United States Patent Application Publication US 2026/0258423 A1 - sequence listing, part 73

SEQ ID NO: 301568 - DNA, 83257441 bp, Homo sapiens (residues 72,583,439-74,718,245 of 83,257,441)
  source 1..83257441: mol_type = genomic DNA
ctcctaggctcaaccgatcctcccaccttggcctcccaaagttctaggattacaggagcgaaccaccacgcccagccactgcttaattttaaaaatataaagaaatatcaccgtgaagaaattaaaatggaaaacagccacatttttggtggctctgaggtgacaaggccactttcctgtccatgcagagaaggtgcagaagctgcgaggggctagagccctgcaaagactgggatcaaacactgtctaccatctgtccccccagggccagtgaaatcacttactacaaacgcctaatctccctggcggctggacatgcgcatggggcacggaggagccaatcacaaaccagaaccgacaggagccttgggggctcaaactcagcctggggaataaaaccacagaagggaggtgatcgtcttcacccagccacacaccccaggtccccacgggagctgccaccgaactctgacatccaccatgatgctcaaaaggcacttttttttttttgagacggagtctcgctctgtcgcccaggctggagtgcagtggtgtgatctctgctcactgcaaactccgcctcccgggttcacgccattctcagcctcccgagtagctgggactacaggtgcccgccaccacgcccggctatttttttgtatttttagtagagacggggtttcaccgtgttagccaggctggtctccatctcctgacctcgtgatccgcccgcctcggcctcccaaagtgctgggattacaggcgtgagccaccgcgcctggcctcaaaaggcactttttaagcacctcaaactgtgcagaaaagtgttctctactttaataaaagttccacttccagcaaactttatatatgaaagcgtgactccgcagggcaagcagcagggaggattcactctagaattctcctaaacagtgagtccagtctctatcctcccatccctccgtctccacaccaacacttccaaaatactcgctcttcactatgtgtgccagattaggagttagagtgggagggctggtccacaaggtcagtacctatccacgtcatttcactgactagtgctttaatgcccctcctgtaaaacaggatgacacctgatcatttcaccaggttgaaggtactatcacatggcatatgggcacaaaagcaattggaaaactccagttcaaagaatcagggcctacggaacgtgctaggtcatcaaaccttttcatttagaaagaatacttgtggcagattcagagctgggcgccacccccaccaactcggccgctcctcacttcctggacacttcactcttcgtgaagatggctttcttaaagcaaaaagcacttcacacacattaggatggctattctcaaaataaataaataaatagataataataaaagaataagaaaacaagtcttggcaagaaaatggaaactttgtgcaccattggtggggatgtgaaatggtatggatgctatagaagatggtatggcaggctgagtgcagtggctcgtgcctgtaatcccagcaccttgggaggccaaggcaggtgggtcacctaaggtgaccagcctaaggagttcaagaccagcctgaccaacatgatgaaaccccatctctactaaaaatacaaaaattaggccgggagcggtggctcacgcctgtaatcccagcactttgggaggccgaggcgggcggatcacgaggtcagaagatggagaccatcctggctaacacggtgaaaccccgtttctactaaaaatacaaaaaattagccgggtgtggtggcgggcgcctgtagtcccagctactagggaggctgaggcaggagaatggcgtgaacccaggaggcagagcttgcagtgagcagagatcgtgccactgcactccagcctgggcgacagagcgagactccatctcaaaaataaataaataaataaataaataaaaataaaaatacaaaaattagccgggcatggtggcaggcacccataatcccagctactagggaggctgaggcaggagaatcacttgaacccaggaggtggaggttgcagtgagccgagaccacgccatggcactccagcctgggcaacaagagtgaaacttggtgtcaaaaaattttttaaaaagttaaaattaaaaaaaagagacagtatggtttttcttcaaaatatgaaaaatagaatcaccatgtggtccaacaattccacttctaggtatatccttaaaagcactgaaagcagagacccgaacattgcacatccgtgttcctagcaacattattcacaatggccaaaggtagaagctacccaagtatccacagagaaatgagtggataaacaaaacgcaatataaacatacagtgggatattactcagccttaaaaagcaaattctgacacatgctataacatggatgagccttgaagaaagtaggctaaagaaataaaccagacacaaaaggacaaatactgtatgatccacttctatcagatacccagagtagccaaattcatagagacagaaagtagaacagtggttgccaggggctgggaggatcggggaatggggagttcgtactgaatgggtacagagttttagtttgggaagaaaaactttctgaaaataggtggtgatggttgcacaacaacgtgaatgtactgaataccatagaactgtgtacgttaaagtggttaagatggtaaattttatgttgtgtatattttatcataataaaaatggtgggccaggtgcagtggctcatgcctgtaatccgagcactttgggaggctgaggccggtggattgcttgagcttaggagttcaagaccagcctaggaaacatggcgaaacctcatctctacaaaaaatacaaaaattagctgggcatcctggtgggtgcctgtagtcccagctattcaggaggctgaagtgggaggatggcttaaacccaggagacggatgtcgcagtgagctgagatcgcaccgctgcactccagcctgggcaacaaaacaagaccctatctcaaaaaaaaaaaaaaaaaaaaagagaaaagtagaaatgttttaaaagttttcaaacttaaagtataataataaaagaaaaaaataaaataaaataaagttttcaagtagttaagtgaagaaggcataactgcagaaaccttctcgtcacttaaagctcaataagggttttactcacatagtgaaattgtccccaaaggccagcacctcagacaccttcctttcactttgtaaagcgcaacagaacccccgcttccacacaggctgctaaatcttcaaatcagcttccgatgggcgccgaagaccaccacagcccacatgctgaagaaccaaagcggctgcaccaatgcctaaaaaagcatccagcaggcactgaatatttgtagaattaaggtaagaggaagtccataggcaaatgattggaaatacatctatcattagagaaggaacactccatggctagctcaaaaagcatgccctgaaatccccactcaatcatcagaagggactgctgggcgggcgggcatggtctttcctggcctatcctactgggacttcccagtccagcaaacaccaaaaagaagtaaattgctaaagtaaaatgaccacttttgaagcaaaggaggtaagtctgtaaatcattaaaactggaccctaacaatcggcatcttccaaaccttgggggagcctcacagacctgggggtcggaaggtctggttgatttctgcagctccagaactgcagtcccttggtcaaacccctaaacgaagccacatctgtttatcacatacaaaggcacctggtttccaagacgtccatgcaaaaacctgtaccaacagaccaaatatgggaggagatgatgatgattcacattacaaaaagaattcttgggcagaaacttgccacttcagcattcttctaggttgcacgattcctccgggccttttgaatatcatgtgatcaaccaagattggttttgtatagatgtttttctaggcacaggcctcgtctgtaaggcaggaacaccaccagctgactttgaacaaggggtctttcgccaacagcataattgaaaacaattcatccaggatcattcctgtcctcttgtgaagtgagctgggtgcatcaatcacatgaacaggggatgctaacttggtgtggaggaccccaaccagctccatgatgacagtgacattgtctagaacaatggtggccacagacagaagcagcagtggtctgtgtgggtacacaaacaaatgtgccaggatgctgcctggtcagggacacgttccaagctcccaaagagcttgcctacctgaggggagaaaatgcccagagctgtagttcctttatcattcacccaaatgcagccactcctgtcttaaccaagtataaagggcatctgacttcaaggctcctaagtaaaaacctgtaccaacaaaccaaacaagtacatgcgggggcccagaccagtggaggtaaaccagaaaggcttcctggaggaggagaaagaaaaaaacactgtggttgggtaagcttcagtgggaaaatgttcaattaaggctttatctggccaagaagtcagtcaacttcctgttttcttaaagtgcctgtgtcagaatggcctgggtggcttgttgaaaatgcagacccccaagcactgaaggtgaggggctggacgggggtgggtgctgagaatattcatttataacgcgttccgcaagcaattcattcttatgcaaaccacaatttgaacaccaggggacaggtggggcagtcctaaagtgaacagtctgcactgcactggagtagattctagaaaagctgcagcgtctgagtagggaggacccaccaggagacgctgaggacagggacaggcaggtgtagacagaggtgccttccagaactgtttagtcacaacagccgcaacccctctccccgcgagacttcctgttatgatcctcactggagctggctagttacagaaaacgtctgtaccagttcacaaggagagagaaagacatgaatatccttcagtttacaagctacagtaggaaggttgggagcatttcaaaaaggaaaagaaaaatcaagtctaggcaaccagaccctaacattaacacagaaactctgtctggacaacagaaatctgttttgttgagatttaagtaacgtcaaaacttccttatcccaaacaaacatcgccttcgctcaatgcaggcaaccactccaagtcagaaaagacacagtgatactcaaagcagacagcctcaattcacgtgtgcgttactggctgaccatgcggtctctttattgtaaggacaggagaagggcccctttcctgggtttcttcaaattcacacaagtggactcttatgcaaagatcctgggctagcctccatccatatcagccacctccaaaaatcccttcgggctagctctcctcaccccaaatcttctcctggaagaaagtcccctaaagaaaaggagaatcacttcctaacccaaaattgcttaacaataccctaaatccattttgagttcagagcagaaatccgtgttccttccaatctgctcagataaccaggaaatgctgtacctgctgggtctgcacgtttagctcccgacacacctgctactccagccggcatgagtcacccacgcaggcattgcacggtgtacttgtcaaccacggattcagtggctcagcagcttgctctcacgcacaccagatggcaaacgtctacccccaaaaagacgtgtcagggcagaccggctaataacccaatttcactcaatgacacattcccactgtaggtttggggagaggaaaggagggagggggtacacagagatgctttccccacttatgggcaagctcccataggccctggaagcctgatacggctctgctaccgtcagtagaggaagggcaaattcacctggggaggaaaatgaaaatgacgtcccaatttcaaacctcctcctgaacaaaggctgtcttctctacccctctgggttcccactttttacaaggtcccattacaggatcccaaattggaccctggaccagaaaaaggacatgagtgggacaaatggataaatttgaatgaggcctgtagactagttaaacgtgttgtgtcagtgccagtatcccaggtctgatcattgcaccatggatatatcagatgttagcatttggggaagcagggtaaaggatatagtggaacccttggcattatttttgcaactcctgtaaatctagatttatatcaaaatcaaaagttaagtttttaaaaaagacagcatgttaaatctagctgcctgatatatcttactttatggtattgctaaaaaaaaatttacatcggccgggtgcagtggcccacgcctgtaatcccagcactttgggaggctgaggcgggcggatcacgaggtcaggagatcgagaccatcctggctaacaaggtgaaaccccatctctactaaaaatacaaaaaattagcccggcgaggtggcgggcgcctgtagccccagctactcgggaggctgaggcaggagaatggcgtgaatcccgcggggcggagcctgcaatgagccgagatcgcgccactgcactccagcctgggcgacagcgagactccgtctcaaaaaaaaaaaaaaaaaaaaattttacatcataatcctgatgacaaattttaagttattctcataccaatgctgatcaactctttgatacaaaaagaaacaaaacaaaacacttcattccctcagcagccattcactctgtgccccttctgcgtccccgctccaagatgcagtattatctgatgggtaagtggtatcttttcctctaagcccatctcggcaatatccagaaatagagttattcctttgctttagacataactctaacttaaagcaaatatagcaatttctgggaattttccaaagaaaataatacaaaatgtggataaatctttatgtacaaaagatgctcactgtattacttctaatggtaaaactttggaaacaacttagtatccaacaatagggaaattgccaagccaattatgagtcaacgcctgcagcagaatacagttaccatgccgtcatgacatgggggaaacgttcaaataaaattacacaaaaaaagaggaggagaaaaagttgtatacattgcaggatttcaccagtgaggaaatatatcaaattgccagcattactgtgtgaattggatgtttttcctgctttgggcacttttgtgtagttttctataaaagaaagagaaagagcatggattactttttaaaatcagacagggaggaggagtggtggggttggttatcagtttgcctggcggtttcaacctttcctctcccggagtcagtctaagcacagaactggggtgggggcagagggtggggaagggccgcaggtaaggtgctgtgtcaacctgggcagttccaaaccctgcatgggaccaggggcaccgagggccccagctcccagggtagggggtcgtgccactatgcactgccttttcttcttccggtgctgctttactttctcttgctcctggagcagtgctcactggagacgctgggaccctgagcactgaccaagagtgatccctgacagcgtcagattcctatgcagaagggactgctgggtgggaaatggatcaccgacaggttctaaatgcgaacccacaggctgcaggagaggggtgaggggcgaaggagggaatcccacctctgggaaagcatcctcaggaaacctagataggtcctggaggtgaggacaatcgccaaggagggagaaggaaaaggaggaccctggttaatctgcacgccaagggtggagtcgctcagtcattcattcaacaaacatctattcagtgcctactcagtgacaggcatcgcgctgcccccaaacagggcagacacaaaagaacaaggggaggaggaagctatggatacagaagcggtatgctttcagttccagactcaagacgtaagccctctccccacattggccaagaaacgacttccattagcaagttgcgccggaaaggggaggtggcgggtggtctcactggactgaattcctgccacctcccacctattcagaaagcccgtccacaccctggccaaacgcgtaccagcgtcagcctgacgggtggcccagtcctcgccggaaagctgcttgccaaacgcccccgctcaccccctagccccaacggtgagaggggctcggctgagtcgcgttctccaaccgctgcgccccagcagcgtccccggtcgccagtgggcggacgccaggagctcacggaggcggcaccgctcccgaagtaacggagcccggagggcgcccaggcgttaaggcaagtgcaaggggccgagcgggtgcgccgaggacgcgggggcgtctcccccagctgaggttcggtccctccaggcagccaaggcttggcagcgctagaggctgaaggacaacggccgagaacgcccaggatggggtggtcgctgaccaccgtgtcccaggtgaatcagctccgcttggaggcagggggatgactaaaatgacctccaagaagatgtcaattacaagaacaaaaatttcaacccggaatctcgagaccttcgaaaaacgacgcggaggaaaaaaggaaagaaagaaaagaaagtaaatcagatcccttccccgaaccgcagggaaacttacctccagcttggcgacccagctgttaagcagaacaaatcaatccacggatggagaagaggtcgtgggtcttctgagcccagctgatacacaccaagtaatccacgttaaggggtccgcagccccccacccaattccccactttccatccaaggccaaagagcagccagaccctgtcctctgcgctccagactcgcggaggtcgcgggcgggggtcctcaggcggccgccttctcgtccccaggggtgggcgcgcgacgcgggcagggaccgggcgcccggaggaccaagcgagcgcatcccgcctactcgtgctgggacatcacccagcctggacgccgctcctcgcctttcttccccgcgcatcgccagcgccaaccaaagatccccgccgggaaagcctctctgccaagctggaaagcgctgaaggcggatcgtctctcagacttgggtttgcaggttcacaaggcccgggaggcttacggtgggcgcctgcctaacagagggtccttgcggagaagcgcagaacgacaaatgccagaggcggtgaccgcgtcctctggataccagcgccgcaccgcgcacccgcgccgcctgcgcgccctgcagtcggctgggccattcggcccttatataccaggcggacccgcgccgggacggggcggagcggggtgggcggggagggggtggggaaggccgaacggcttcctgggagtcgtagttcgactacgtagtcctgtcgtagtcagaacaaaagctaaacaaggatggaaatggttagggtttgcccaccacagctgtcctcccttgcgcccttccttcacagacaaagctggcattccagtcctattgtcaatgccgctaggtctattctggcctttgtgcataaggtgggtcacaccagccccgaatgccgcccaggatgacaaaccttggtggccctagagtcaggttatcccagctgggccccacttctggagaccagaggtccgaaatcaaggggttagcggggttgcttgcttctaggggcagtgagggagaatctgtcccgggcctctctgagacctggtggtcattggctatcttaggcgttccttatcttaggcgttccttggcttgcaactgccttaccttcatcctccaccttttacacggtcttctccgtgtatcttttcacatagttttccctctgcgtgaatctctgtctcttcacactgtggtgtttctacaaggatgccagtcatattggataaggggcccaccctgatccagtacgacctcatcattaaccaatgacatctgcaacgaccctatttccaaataaggttacattcttggaggtcctgaagattaggactgcaatatattaatattttggagttgtagggggaaaagttcaacccctaacaggtcttctatgccttgttgcacctattaacagccattgtgactaaccaacccttttgataaaagcaagccctgagaagcaagatgaaatcacaaaatcactgaggctgtgacaggaggggaagccaagaacattggaatctcctgggccaggttttcctgtggccacggtgggattgctggagaggaaatggtcagaaaaagaaggcatcaggttgggcgtggtggctcatgcctgtaatcccaccactgaggtcaggagttcgagaccagcctggccaacatggcaaaaccccatctctactgaaaatacaaaaaaaattaggtgggcgtggtggtgcatgcctgtagtcccaactactcaggaggctgaggcatgagaatcgcttggacccgggaggcggaggttgcagtgagccgagattgcgtcactgcactccagcctgagcaacagagtgagactctgtctcaaaaaaaaaaaaagaaggcattagtattgaaagtaacaggaggcacctgggtaaatggggttggggaggggagaagatagacagggcattcctagatgcccctgaagcacagacttgattttccacctgccactgtgcccaagtttccccccattcaagtcccaggctatggacaagctcaggtctggccctggaatcctggctctcacctggcgctgacattcccggagagtcagtggcagtgcagggtctggattggccaccatttccactctgaactcacaatcaactcctctcttgcttccaggtaagagaaaaactgaggccaagatgaatgtcaaaggcagggatatccgaactccctaaaccctcccctacaggatattgaggataacgcagctttgctgctaggagccgcctgaccttctccccactttccagaacacgggctgcatattcctagcatacgaaagggcatccagtcgtctcaaaatggtatcagtgcctcttgctgactatgcatggttattgttttctcctgcgttataattcattctagtcctcagtcttcttaaatttctgcacaccaaacattagtcacttgaataattagaaaaatatagaaattaattttaactcatcatttatttcttctcattgctgtgagattgattttccccaggtaaagctggaatcatgtctcttccttgctcctaaaacatccagagaggtataaacccatgtttagcataacatagagatgacagatacaaacatacatacatacatagctagatagaggtaaaaataagaattgtatgtgtacatgcattagcatacacacacatatatctcctttctctctctgctaagagggtccagaagcaatggcagcccagtagcaatgagcactggatctaagcgatcatttagcacctaggtttgtttttatactattgtccaacagaaggaaccagagctcattggagaaacagctgattctaggactggggcaggaaatatgcaagatgagcctggagcacctcgtagtgtcagaaagtaagaaagtgctaaaacacactgacacacaagcatacacaccatacaatggtggggccacgagagaaggacatagaaaccaactgaaagagctcttaatcgccaaagtgggggaaccatttgaacaacaacttaagtaaagtggtattagattataaccaaagtaataaaaaaattcatgagttcatattgatataattaggtgattggaaaaataaatacacagaggaaaagaaatctgtgcagaagaatttcaaaaaatgtatgtaaatacactgccctccaggaagtggagtataactccccatttcttaagcgttggctgcacacagtgaccccaactgagagatggtctacaaaacacctcatcaataaccctcaaaactgtcaagttcgccaaaacccaggagagtctgagaaactgtcacagctcagagaaggctgaggcttgatgactgaacgtggtcttctggatggaatcctggaccagaaaagggacattaggtaaaactaaggaaatctgataaagtgtgggactttagtcaatagtaatgtaccaatattgattcataattgttacaaatgtgccatgttaatgtaagatgtaataataagggaaattgagtgtggttgtattagtttgttctcacgctgctgataaagacatacccaagactgggtaatttataaagaaaaggaggtttaatggactcacagttccatgtggctggggaggcctcacaatcatggtggaaggcaaaggaggagcaaggtcacgtcttacatggtggcagcaagaaaaaatgagagccaagcggaagagaaaaccccttacaaaaccatcagagacttattcactaccaggaggacagtatgggggaaaccacccccatgattcaattatctcctactgggtcactcccacaacacgtgggaattatgggagctacagttcaagatgagatttgggtggggacacagccaaaccatatcagtgggtatatgggaactctctgtactatttttgcaatggctctgtaaatctattctaaaattgagatgttattttaaaagttacatatgtatttaatataaatatgcatatatatggtgataaaaataattgcaatatcaaccctctctcgtgtatcaaattttctccttttttgagtagattcatggctctctattctgttccactggtcagtttttctaactctgtaccattatcatggtgtcttaattctaatactttttttttttttttaagatagaatctcgctctgtcccccaggctggagtgcagtgccatgatcttggctcactgaaacctctgcctcccaggctcaagggattctcctgcctcagcctcccgagtagctgggactacagacgtgtgccactgtgcctggctaatatttatatttttagtagagatggggttttgctgtgttggccaggctggtctggaactcctgacctcaggtgatctgcccaccttggcctcccaaagtgctgggattacaggcgtgagctgccaggcaaagcccattcatttcttacaccttatttggaacttctctcactttgtcttcttcaagagtttttaactattcatagacctctacatttacaattaaatttaaaatgagcatattacatttcaggtgaaaataaatgaaaattgcggaggaaaaataacttcagaagcccctcgttgcccacaaattcacatataaactcaacagcctggcatcaatgccttctgcagcctaaccttaatctactttttcaatcttttctcctgtgctccccaacaacccctgtcctgtgctccaggaaaactggaatatttaatatttccaaaaagacctcaattcctctagtcctcactgtggcttccagagcctcctctatccagaaggccctttgcctctgcttatggagttttgtactcttcctctatctgctttttgggggcagctcacacaccacctcttccatgaagacttcccagatccccagtaactgagagaactccattaaaccaccaagcactctgagtccctttctaaagtaagtttcttgaggtcttccattttattcccctttgtcacgatcctcccgtctccaccatttaaagtattgcacatagttgaggcttattaggtattttgaaattaactatggcacttggatcagagttcttggtgccagcatacacttgtcttcacgggtaggaccaataccatcataggtgctggtcttttcagagagcttgctgggtgccagacactgtcctgaacctttacaatgtatctcatcatataatctcccaagaagccaacagtaggtactatgattaactctattttagaaacaaagaaatcgaaactgagagcaatgaagcaccttgcttaatgttgcagacgaaatagaaaggccagggtaaaaatgcagactcctctctcagaaacttcatcctactccacagtttcagttaacgtgtctataaatttcccagcagcaaggactggatctttttacattgttgtacccgctgcaccgaggattgttccaggaagagtaaatgctctgcacaagctgatgtaagaatgtggctgaacaggtgtaaagcacccagcacactgccttgcccattacaggcactaaataaatgttagggatcttagtaagcctacctgtgctgctgtccttccttctgccccctccctaccctgcctgggctcttccattgcccatcccactcccccatgtgtgaaaggtgtggcttaggtattggatagagccgatagagaatctttccaccatcacagaacattctattggacaggactgcaacagcagcatcgcctgagacttcattaaaaatggaagacttcatactgtccaccgagcatcagaatctgcacctgctgatgcacattatttttattcttaattttgcaagtggatataaatatacatagtcagccccctgtgtccatagttctgcacctgtggattcaaccaactgcagatcaaaaacattccagaaaaaaaaatccacaaagttccaaaaagcaagacttaaattttcttcacaccaagtactacattgaatccacatgaatgaagtgatgcacaggcgttgtgttaggcattataagtaatctagagattatttaaagtatataggaagaggggagtaggttatatgcaaacactaagccatttatgtcaggaacttgagcatccttggattctggtatccacagggcatcctggaaccaatcccccatggatactaagggtcaactgtacctaattttagaattatttttaaattagcaagtcaaaaccccctggacagagtgttttaaacaaatcaaatgatatcctatatctggtcttgcaacactcttttttttttttctctgagctatgtgttgtgcagaattttcataaatctagcagttcaagggagctatagcattagggaatcatttgacacaaaataaattttaaaggaagttcacagctggcctgatgccccacattgagcgaatgcctcagatcacaggatatgcatatcagttggttaaaatatgcagatacacttggtatcgatatccaaaaatatcaaagggaggtttgcacaaggagagagccaaagcactgtggcatgtttgagaggtgagagggcatgccagtgggatctaattataaatcccaggctgctgaggttttcatgcttgacacagagattaaaataactcaaaaacaaacagtcacagatttcagccaaaaacacgctgttctttagtggaatagttactccagagcttccaagaaatttcagaaggtgtgagccagtccattcaattttcaaacaattcgaagagtgagtcctcatgcctataatcacgtgaggggatcgtcagagctcagacctttctttccatgtcacgagatgatccagtttttttctccatcctcttcttctcccctcaataataaatgataaaaagcattcattgagcacttactaaatgttcagctctgtgctaagcacttataaacctataatgctcactgaaaccctaagagataggaaagatgattattgctgtgttacagataagacagcagaggctcagagtaacttgcacagggtcacgcagccctttccgccatcttcctccttccttcctcctggcttcatcaaatggactcatccttctttgcctccaggggacatctcatctcttgagtccctacattctaactcttacttacctctaccatgccattaaaagtgtcctctcagctgggcgcagtggctcacgcctgtaatcccagcactttgggaggacgaagagggtggatcacttgaggtcaggagttcgagaccagcctggccaacatgatgaaaccctgtctctactaaaaatatgaaaattagccagacatggtggtgcatgtctgtagtcccagctacttgggaggctgaggcaggagaatcgcttaaacccgggaggcggaggttgcagtgagccgagatcgcaccattgcactccaacctgggcgacagcgtgagcctccatgtcaaaacaaaaatgaaaacaaaaacaaacaaacaaaaaaaccagtctcttctctagggtcccagaaacctgctaaccactaaccaccgaatccagggtgctggttctagccttcttagttttgttctctgcagtttcttttcccaaaatccccttttcccatggcttttgccattgtgtgccaggcacgaggtctctgcccactgactatgctcccttcccgccccctacctataggatgcatcccaggctccagtcctgagctgtccccaggtctcctttcttcagtaccttgctccctctcatacccaatcctgccaacgaagtggttggctcgattccaggtctgctttcctgactgcccatcagacatgtctacaccagctgaaacccaggctgtctaagaacaagcatctataactacccactgatgatgccccacccaatggccccttgctaccaaattgccctgcagccacagtggacaattccagcaagtggccacctcctgcctcagccacctgtgactcttgtttttttctttcttttatttttcttgctgttctttggccttgtttagttccttgcagaagcatctcagaagtgccaggggtttaccctgtctaaggacaaccctcaaggaagggagtcattagataaatattccatctttttcatccttcgattgggcaattttggttttttttgtttttgtttttgtttttgtttttgtttttgttttgagacagggtctctgtcacccatcacccaggctggagtgcagtggtacaatcttagctcactgaaaccttgaatttctgggctcaagtgatcctcccacctcagcctcccaagtagtgggactagggactacaggcacatgccaccacacttagctaacttcaaaatttgtcttgtagagatgaggtcttgctatgttgcccaggttagtctctaacttctggcttcaggggatcctcccggctcagcctcccaaagtgctgggattacaggtgtgagccactgcacctggcctgatttggcacttctgaagtttattttattgagttgcttggagggtccccagtgagattcagccctgtatgcccacagcataacctctcattcgccaccctttattgacttttctccctcccaattctctctctttgttcttccaaagataaactcacaaatccagttacacacaaacgtttctctgcctcgagaagaatccaaaataagataccaatcacaaatcatttttttttcctgctggattctttgctgaggcctgtgatttttctaagtctcccagacatcagggttccaagcttagacacattctgtattcttttgctccatccccttcacccttctgagtgtttgtgactcatggctttcaaatgtctaatatttccattattccattcttcccagcctggtgcaggtcctacaacctcacactgtgatgaccccaccaccaccaccgttgctcacaccatcccatctgccagaaatgcttttcggactttgctgggcttgtccttgcagagtgcctcttgtgtgccctgccttgtgccaggcaggtacttcagactcctgggatgaccttccttcccaacccacccccgcgatggctgtcttctcagaacttcccttacattatcatgtactccattcatctgacattgagatatactgtctttcaccagtggttgttaagatgtgtacatttctggctcctcccattaattttaagtgttctgggatcaaggagtatatcacatatgctttcttgcttgcttttttttttgtttttaatccttttaacaggggctcagtcaacattggctggtttaatttgactgataatgttaaattgccaacaaagcaaatgcaggtaaatagtgctcttgaatgtggacaaacggattccttccccaaactgtgctgaatcaatttccagacggctcacccacaaagtcctaaccaaaagcttggtattacagcaagccgcccaagccggtggaattaattagcctgcacctacgtgccaacatcattctaccagtcaatactcttgatggtctgtgatataaaaaggatagtgtctgtcctagaggtgctatgaagaatgtgaattggtagctttctgtctctagattgaacagtggtgaccattcattcatttgttcaacaaacatctatttagcatctggtaagctccaggtactgtgctaggcactggggatataatatcaaaggtgagagtcaaagtctcttttttgtggggagatggaataaataagtaaacaactaaattaaattattgcggagtgtggtaagaacaagggaagacataaacctatgctatattagagggaaaagaggcttcttgaagaaggggtaacttatgaaactgatcaaaactagatcatccgacactggtacatacacatccatcacacccatataagtgacggagaggcaggtgatgttaaaggaaaatctggccagacgtggtggctcacgcctgtaatcccagcactttgggaggcgaaggtgggcagatcgcttgagcccaggcatttgaggccaagctgggtaacatggcgaaaccccgtgtctaccaaaaaaatataaaaattagctgggcatggtggcatgtgcctgtagtcccagctacttgggaggctgaggtgggaggattgcttgggcccaggaggtcaaggctgcagtgagccgtgattgtgccactgcactccagcctggatgacaaagatagaccctgtatcaaaaaaagaaaaaaagaaaaggaaaatccacagtttgtgccttggaataactggaattcaaagctagttcagcaaatggcagtgtcagcaaagggtctagtcaagttgactttggctttaaaagcagacagagaagtttggtgaaagggtgatgtggaggtgactgagtcaaaggctggagtgtggcaaagaagtgcattccaggggtatgatggagagaaaagcaaagctaccgtctcttctacaagaggacagtcagaacaaacacaacacagtctcacatccaggggaaacgtgaatgaaatggcttcagaaagacccagacacccagaagtgccagcaccaggtgacagagggaggggacccatccagaacacaccttctccctgtggcagaactagcgaaaccaaatagggcaacacagaaaggcgacctggtgtgtgtgggttcagagcacaacttccccaagcctcctccagggggttaactggaagtcctacccagattttgcaagaagctttgtcatgcaaatattctccaagacatcagttcaggcactcacctcaaatgccctcccttctccctcggtcatttcttcctttccagtgagcaggtcacaagggcaggcgcaggagatgtgattgagctgtgctgggaaatgcctcggccccaccccactcctactaccccctgtgaggaggaggcacaggcgggcactgccctcggaacactaaagctttgtttcctggaggttctgaaatcagcctcctcacgtacctcacccaacaccaaacgttctgtctccacttcctcctccaccaaggactttggggggcttgaaggagaatgagggagagcggcagaaaggatggctagctagtaaagccccacatgcctgctcaggcctgttcaagcccagtgaggtatatgtgggttcagaactgattacacttccccatcttacagatgagaaaatgggcttagagaaactgaagaattcgacccgggtcacatggtgggtagatgctgaacaggctttgaactctggtaattccaagggcacaagctgtgtattttttcctgtaacatcacctgtctccttgccagctgggctggagagatggctctctgttgaagaaagagaagactcagattcaagttcagggtcagcccttaattagagtgtgggtttcctgtgggaaaatgggggttggccccatgtacaagtctccgatgaggtcatacgccgtaagtctgttccatgggctctgtagaaaaaacacagctgatgaaaaaaataacaaaccatcacattgttattcatttattcattcactcattcaatgaaaggtttattgagaggcttctaggtgtcaggcccagggcagggagagataataaggatctgatccttcagcctagaagtgaaaggcacattcttaagaaatctatccaacccttcattttacagaggtagaaagtgaagcccagagagggaaagcaactcacccaaggtcacacagcgaggcagcagcaaccaccaagacctagggtagcctgcctgacagtgggcctatcagcagcccaggctatccaaagaaggtaggacatgtcattcagttcaacctaatagacctgttctaaatcaactaagccaggaagccaaaacctgcttatggggccctactgcgggtctccctggggagaggaatcagccactgagcttttgacagaaatcagccaccctgcaggagatgtcctacagagatgaccagcccaatttgttgctgaagccctcactttagtgagcccagttcctaagcccagcactaaagataacacacctccctccatactaagtccctgtcaatattcatccagcatctaaagttctggtgccagaagctgcacctccacagatcttcaagctaatctgtcctagcccaggtgagattttgcatccgaagaaaataagactttagtcagattacccaggaataggacctgatgggtatcccagggactaaccctctcgccctgcagatcactgcctgacccctccacctggctgacatgtccctgggtagagagctcttctggtagagaagcacagacggttccgggaagcaggaaatgtcagggtcatggccggtgctagaagagttgccttctgtccttgaaagctgaggttaagccacatccgatgacctcagaggacatggcaggtgagcataggaccgtagcatggcagaaacccagccacctgccagggcgaggcctgcaccctcggggagccactgtaaacatctgcccctccgcatcacgcaacttaccagagacgaggcttaaacacaagccttcattttctcattaataaatccagtggtttcccttggagagactgccgctagccactaaataaaccaaaaagaaaactctctggaaaggcaaacaggttttcaggccaattctgatccatctcagcaaagaagtggtctttgatgcctctaaagctttttgtcttggacaaccggcagtggagctcaaggactcggggctccatacctgactaagagattttgtctctaaggagccacaggctggaaagcacaggttgttttgtttctcccaacaccagcgggctctgaggaagacggagtctgcatgagatttagaaaggttgagtaaaaagacacagggagaggccgggcggggtggctcacccctgtaatcccagcactttgggaggctgaggcaggtggatcacttgaggtcaggagttcaaaaccagcctggccaacatggtgaaacctcatctttactaaaaatacaaaaattagccatgtgtggtggtgggtgcctgtaattccagctactcgggaggctgaggcaggagaatctcttgggcccgggaggctgaggttgcagtgagctgggatcgcaccactgcactccagcctgggtgacagagtaagactccgtctcaaaaaaaaaaaaaaaaaaaagacacagggagggagtaaaggaggcagaaaagaccataagaccattactgcttctcaaatgtaccaatgaggcatcacttctgcctgggacaccctcctgtgcccaggagctttgcatgtctggctcactcctaccacttggttctctgcccagtgtcacctccctagaagagccttctcccaccatgccgtaaaaggtgcctcccacttccctgtcaccttctaacacagtgccctgtgaactgggatacaggagaaacaagagaagagcccccactgagtataggaagagatctccactgaaaagagaaagaaacccccactgaagaggggagggacccctcactgaccatgggaagagcccccctttgattatgagaagagcccccccactgaatgggaagagcctccccagttaatatgagaagacccctcccactgactatgggaagagccccccactggccatgggaagagccccccagtgaatatgggaaaagcccccctttgattatgagacgagccccccactgaccatgggaagagccccccactgaatggaaagagtctcccccagttaatatgagaagagccctcccactgaccatgggaagagccccgcagtgaatatgggaagagcccccctagttaatatgagaagagcccccctccactgactgtgggaagagccccccagtgaatatgggaagagccccccactatgggaagagcctcccattggctttgggaagagccccccactgaccatggaaagagccccccactgactatgggaagaggcccccattgactttgggaagagccccccactgaccatgggaagagccccccactgactatgggaagagccccccattgactttgggaagagccccccactgaccatgggaagagccccccactgactatgggaagaacccgcatccccacccccgccaccaagtatgagaagagatctccactgaataggggaagaggcccccaccgaaaaggggaagaacctcactaagtataggaagagccacccactgattataagagcccccactgattataagagcccccactgaataggggaagaggcctccactgagcacaggaaaagcccccaacagagtcatgctcctggccactttctccaccttgtcctcagaacaagccactgactggtgggcaagagccatgggcccaggtttctggagtcagctgctaatttatctaaagtctgtaaggcctggacactgagtctcagaagtagtcctgctagtcttgctctatagatcctaacttggcctcagaagactgtccctagagctaaactgaaagggggaactgagagctcaggcaagcccacctggtcccaggacaatcaggttctccagcctagctctgatcattaaaaatcacacatgggagctgcacctgcctgactgctgtgcccatgtctctgttggcttaaaaatcaggcaaagacttccttagaccctttctatgtgtttgtttattttgatctctcctccattagaatgtaaccaccagggtctctgcttttgctcactgtatccttagtccctagaagggtccccagcgcctagtgggtgagtatcagatatatattgctagagaaaacagatcatcattattgagggtctactatatgctaggcatgagatggatgtctcacctgatccccttgacaacctttaaggatgatgtgattaagcccattttgcagatgaggaaactgggattcagagatagacagtgagctttctagcatgacattaatgaggagcatcacgccaggccctgaagtgcagggggctctcattccacggttttaacactcaaaaccacagtggaagttcaacactaccaacagcaatcatttcaaatgaaaagaacaactctttaattactttgacaagttgacttttaacctacctattttcaaaaagtatttgagtcaagaagaaatagaatatctaaacagacccataacaagtaaaaagagactgaattagttaaaacaaaaccaaaccacatgaagcagagcctaggaccagatggcttcgtggatgaatgctaccaaacatttaaagaggaattaactctaatcccttacaagctcttccaaaaaaatagaagaggagggacaacttcccaattcatactatgaggccagtattattaccttgatactaaaacaagacaaagacaccacaagaaaagaaaaacacagaccaatattccttatgagtagatgcaaaaatcatcaacaaaatattgtcaaactaaatccagcaacatataaaaagagcagacaccatgaccaagtgaaatttatctcaggaatgcaaagatggtttaacatagaaaaatcaatgtgacacaccatattaactgaacaaaggacaaaaatcacatgatcatctccattgacacagaaaacacatttagcaaaattcaacacattttcattataaaacactcaacaaactagaaatagaaggggatttcctcaacttgacatagggcatctatgaaaaacctacaattaacatcatacttaagggtgaaagactgaatggtttcttgtcaggaataagacaagtatgtccactcttaccacttttattcaacattgtagtggaggttctagccagagcaattaggcaaaaagaaagtcatccagattggaaaaaaaaaaaaaaaaaggaagcaaaattatctctatttgaagatgacatgataagaacaaatgttggcgagcacatggagaaattggaaccctcatcctctgctggtggaaatgtaaaatgctgcagccactttggaaaacagcctggtgatcctcagatgattaaatatagagttaccataagacccaggaatttcattcctaggtatgtagtcaagagaactgaaaacgtatgtctatactaaacttgtacacaaatattcatagcagcattaaccataatagcccaaaagtagaaatgactcaaatgttcatcaacagatgaatgaataaattgatatatccgtaaaatggaatattattcagccatgaaaaagaatgaaatactaatacatgctgcaacatagatgcaccttgaagccagacacagaagccactaactgtatgattccatttatatgaaatgtccagaataggcacatctctaaagacagaaatagatcaatggttgccaggggctgaggcatgcaaggaatgagaaatgtctgcttatggttatggggtatcttttgggggtgctgaaaatattctggaattagacagtggtgatcaatgtatgacttttctgagttgtacattttaaagggtgaacttcatggaatgtgaataatatctcaataaagctgttatttaagaaaatgaggccaggcacagtggctcatacctgcaatcccagcactttgggaggctgaggcaggcagatcacttgaggtcaggagttcaagaccagcctggccaacatggtgaaaccctgtctctactaaaaatacaaaaattggcggggcatggtggcatgcacctgtactcccaggtattcaggaggctgaggcaggagaatcgtgtgaacctgggaggcggtggttgcagtgagctgaggtcatgccactgcactccagcctgggagacacagcgagactccatctcaaaaaaaaatgataggaggtgccctcagcaaaaacacatctctacaaattataataaagaccagtaacatgatacaagtagagacaaatagttaaagggagaagggagaagagcaagccgctcgtaagtaatgaggagaaacactctctgagtgatggcctagtcttatgctggcattccaaatgaaccttgtgaataaaggcacatttgaaaaacactgtcattttaatgtttcccaatatagcaatgcaatactaccaatatcatcaaaaacagttggaatgtaatatttaatggcaaatggtgagatctagaaatttttaatataagccagggaaataagaagggactgtctgttctccattcttggccatttgagtcactctgttgaagtgcatttctgtggatgcatttgatttcatattaatcaccactgcatttctagctcaccatgtggcttttggccaggcattcacaattcacctataaaacgaaagggtggggcaacattctttgctgttctaaaatctatgacttgacttggctcaaccggaatatatgaagcatggaaatctctctctttgtgtccttgaagggtttacatttcttttaatggccacaaattagaagcaagaaataatgggtcaagtcattactaaatagtatttatttccaacccaaacgttacttttaatggggtactaaactaagcagcagaagtatgcaataagaacagaggaaatgtcatgtcctccaatctttgctcaaatgtcccccctctctttttttattttttgagacagggtcttgctctgttgcccaggctgtgaagtgcagtgatgctatcatagctcaccagagcctcaatctcctggtctcaagggatcctcccgcctcagtctcctaggtggtcggttctacaggcatgcatcaccacgcctggctaatttttaaattttttgtagagatgagggtctcgttatgttgcctaggcttgtcttgaactcctggcctcaagcaatcctcccgctttgacctcccaaaatgctgcttgaacccctgtgcctggccaaatgtctcctttttttgtttgtttgtttgcttgcttgcttgtttgacacacagtctcactccgtcaccaggctgtagtgcagtggcacaatctcagctcactgcaacctctgcctcccgggttcaagtgattctcctgcctcagcctcccaagtagctgggactatagatgcatggccgccacacccagctaatttttgtatttttagtagagacagggtttcaccatattggccaggatggtctcgatctcttgacctcgtgatccacctacctcagcctcccaaagtgctgggattacaggtgtgagccaccatgcccggccccaaatgtctcctttttaaagagctctcagcctctatttaaaattgcaacccaatggccatgcctccctccagcactggagattgtctcaactctgctttccttttctttttcagtagcacttatcaacttccagtagataatataatttactaatttaacacacctattatttatcacctttagaagcagatttctctgatgtatactatgcacccagcactgtacagaagagaattctgagcaggagaattggaccttttccagtatactgagacttcttccaaaacttaagaaaatgtttagctggaagatagtctgtgtcagtctgttttaaaatacaggcatgcacactgtgccatgatggctttcccatctcagtagtagactctgcttatcatgtccatcaacaatcagaaaataatgatttgttcctacatcaacactgcagttactcagttcatatatttgtttattgaactgagagcttctattaaattgtgaatatatcaaatagtgtttgttgagctgagagtctctttatgtgataagtttgtttctaaaactaattgctgctttagaatacctataatgcaaattattccgcctggtacccgctcctcctttgagaacaacgcttcccacctcgtcccacggttctggcaggagcagctctgttggtgcatggccttcttcctccccttggctacagttgacgggtccaaggatgggcatctgactttagctaatccaatcagagtcctgccttgagatttggctgactagaaccgaataagggaagctcgccctcagtgaaagctgcaagatgtaaaagtcaagggcaagagggtgctcatgtttcctcccaaatgaagaaagcagatctgtaaagagagagaagaaagctccgtgcagagaaaactcattccacacatgcccagaagatggactatattctttctgtccttccggttgatatttcattctttcttgattgttgttgttgctttgttttgacataatccttccaataaataccttgggatccatgctagtcccacttggggatctactccttgcagctcccaatccatgcattaagaggtcatgataaagacagtcacagctggccgggcacagtggcccacgcctgtaatcccagcactttgggaggccgaggcaggtggatcacctgaggtcagactggccaacatagtgaaaccctgtctctactaaaaatacaaaaataactgggcatggtggcaggtgactgtaatcccagctacttgggaggctgaggcaggagaattgcttgaacccaggaggcagaggttgcagcgagctgagatcaccccattgcactccagcctggccgacaagtgtgaaactcagtctcaaaaaacaaaacatgaccgggcgcggtggctcacgcctgtaatcccagcactttgggaggctgaggcgggtggatcatgaggtcgggagatcgagaccatcctggctaacatggtgaaaccccatctctactaaaaataaaaaaaaaaaaattagctgggcatggtagcgggtccctgtagtcccagctactcaggaggctgaggcaggagaatggcgtgaacctgggaggcggagcttgcagtgagccgagatcacgccactgcactccagcctgggcaactgagcaagactctgtctcaaaacaaaacaaaacaaaacaaaacaaaacacaaagacagtcacagcaactactgagacgggaaagctatcatggcatggtgtgcatgcctgtattttaaaacagacagatacttacagactatcttccggctaaacattttcctaagttttggaagaagtctcaataaattggaacaagtctcaattttcctgctcagaattctctgatgctcagatgatgatggttcaattggaggtagctcaccagggcaaacggcctgcttctgcactgccagaggaacgaaggtggaagccgctcaaaaagaggagcttcagttggagcaactcacctcagcactaaaagaaagatgtgaagtcccctggggaagtcagaagccgacaaaggatgacagagaaaactccagaaatgttaaagagaaagagatcaacaactggtacattaataatctgaatgatagaagaaacctagaaaatttgcaaactgcttcagttgatgaaacttttctcaattgtaataattatttgtccattccattattataaggcctctgtttgagcagaaataccatgcataaaagaagagaaaaaggatttgttctgtgtgtctttttttttggagacagagtcttactctgttgcccaggctggagtgcagtggcgtgattgggctaactgcaacctccacctcccaggatgaagcaactctcctgcctcagcctcctgagtagctgggactacaggcatgcaccaccacgtccagctaatttgtgtatttttagtagagctgaggtttcaacatgttggccaggctggtctcgaactcctgacctcaagtgatctgcctaccttggcctcccaaagggctgggattacaggcgtgagccaccgtgcccggccctgtgtgacttttgactccagtttttggatgaatcagggtcctaacaggatacaaacagcacaaccactttgggggactgaaaagagcttaagacagagatgatgtattatgggatgggcagagttcaaggaaccaacaagggagagtgcaggttcatggggccagcagtggtgggaaggcatgacccccaccctctgaagtcagacggggcaaggagagcagaatgtttccagaacccagagacagcagctgcggagaaaggacagcctgccagaaactgaggctactttccttccaccctctaatcttctgctattcgctccacttgctgaactcagctggaatccagtggccaagggagcctgctgatgcaatccctacaagggcagctcttggggcacagatcaggggtgaaatggagacaagatctggatgggcaaaggaaggagatccagctcacgtttcaagggtgagtttccactctcgtgccagcgttagagggggatgctagggagagacagcgcccctgacatcccccccagctctagacctctgttgccacttggctttcagacatctgtccctcggtgcctctcagatctagcacatccaaaccagaccactgatcctgctactcagttctgaaccattcttggacctcctgatgatgtgtcatgctatttttccagatttctcttcctggccacccaggcttaaagcctcagggctacctccactgtgccctcttcgacatgtggtcagttgctaccccctccctccacaatcctacactccaccatcttacccatcctgtcttttctcattttcttccaactagaccggtggcatctacttctaactgtcatctctaatctcttcccctttaaatgtaccctacacaccacagcctgattaatctgtctaaaacacagcatggatggtgattcatctgcccatgtctcaaccaacccagcccttccttgttccccaaatatgccccatgcttgcctgccttcatttcttggctaaaacctttcctttgcctggaggaggggctgcccttcatctttttctcctgaagccaagctttctttcatgctcccaaaatattttcatcttccctcctcccctctctctagatattctgcttgtacctttcttatggcacatattccagcttaacttatattaccgtaattcggggacatgggttctttcttattttccttaccccattgcaaatttgagagccagagtcatgccctgttcatttccgtagttgcccctgagacctagccaaacagctggcacatagtggatgctaaatccccatgcagtgaatgaatgaatgtggctatcacttaggatattttccaaaagccgtatgtacaatatatttcttggcctgtctctcttgtctacataatgatacaaatcaaggaaggccctaacgagtcccatgttgattgtggggcatatgactaatcccgtaatacacttggactgctttatgaaagcacttttcaaacagctttatagcatatctaggccacaaggttgggaatagatacctagagatttattggatcattaaatgaactagggaacaataggcattgtgttaatttacacacacagtgggagagatccaggacacctaaaccatccccatgttaaaaatcagccctcaggccccatatagtctgcaactcacccaaaagtacccccacgaggtacacaggagcctctccccaggctcatggaaacagcaacaaaagtcttaaagtcttaagtccaccacaaagatctgatcggtgtaggtgggggaggatgggtggtgggagagaagagaggaattgtcaaaagtgcagtgatttagtgtctgtctctttcttcccttctccctccctccctcccatcaccctgcctcctgcacaaggaactattgagaaggcacagaacaaacgctcccttatgcggctcccacggcgtctctcggtttgtcggagacagctgcccaaagcacgctatggttactcattacccgggttcccaggcaggaaaaggagcaaacttaatagactcgaactaaccctgagctcaaatactccagccataaataaataaataagtcaggtgtaccaggggaaggggagggaagtgaacggggaatggctggggaggggtcggcagtgtaagcggactgagtggggccgggttgcgggggcgggggtggcggtgaacacaacccaagagtttctgaaaggggaggggaaggatggagggagggaggaaaactcttttctccctttggaggaaggacagagggtgtttgtgttgcttgcttgtccccgcctgcagagtggacgagaggctctcagctggccatctggggaccttgcggaaaactagaactttgaggggaaaggaaagaaagtcctgtttctccagcgtgagatgtggctggggttttgctttcctcctgactcacagagtaaatggtttagttcatggccatcgaagtgcccattgaacagatgggaagggcaaggatggagagagaagcaaagggactgaggggcagagtgactgttggcaggaagtcagtcgtgctccaaaactttgaagtcgtctctatgagtgctcctcaacccacacacttttgcccctccccctactctggagacactgggcaacgtctggagaggtttttcatggtcacaactgggaagccagggtggtactggcatttagttggtagaggccaggatgctactcaccacgctacaaggcacaggacaaaaccctgtaataaagaatgatccaggccgggtgtggtggctcatgcctgtaatcccagcactttgggaggccgagatgggtggatcacctggatcacctgaagtcaggagttcaagacccgcctgatcaacatggtgaaaccccatctctactaaaattacaaaattagccgggtgtggtgccaggcgcctgtaatcccgggtactcgggaggtggagacaggagaatcgcttgaacccaggaggtggaggtcgcagtgagccatgatccagccattgcactccagcctgggaaacagagcaagactctgtctcaaaataataataataataaagaatgatccagcctcaaatgtcacagtgctgagactgagaaatcctgctcaagatgtaagtctcagaacccaacctccatcccaggctgcctctaattctgcagagggcatctgtcagtccataacaggtccataaattcactccttcttccagggtgaagaatggagaaaaatcaaagaacagcacatgcaacgatgcattggtgatctccttcctgctaaccctgtggccaagaacacaaagcaaacacgacccccaacagagaaggcaggggaggagcccaccagtcaaaccagcattccctagtccccgcctgatcattgaacagacttgagggggcgcagcatcttttacctggtctcagaatttctgccagtcttggcatgttgggggcttgggaggttgcattttgggttttgttttatggcttaatctggacctcaattcagtcaagtcaatgagagcagggacagtccccagtcaccatctcaggaccatggcaaaatgtaatgagctttttcaggaatttaaagtactcacagaagggccttctgcaaaaatgaagcatgacccaatgagtgtagcccagcgcagtgagggtggacaacttcaaggccattgtttttcagggggctgtggcagccaagagttgctgggccctgtacaaccgtcaaagtactcccaggaatgccactggtctttccacagttgtccaggggtggagaatccactgagggtcaatgactctgttacagtcatgtcagtaccttaaaggtttgtggtggggggctgtggaggagttggggagggattatatctgtagtgtgtgcgtgtatgtgatgtgcatgtgcatgtatgtaatgtgtgtgtagatgtgtgtgatgtgcaatgtttgtgcatatgcgtgtgcttgtacctgtatgtgatgtgtatgcatggcatgtatgcatatatataatgtgtgtgtgtacgtgtgtgcctgtgtgtgtgtgtatgacacaccagctgatcaatgccagaacaagaagaccaaggaagattccagagataagactgtcctacatctctgattgatgggcatctttgaagacgtaggctagcatctagaggcttcgagaggaagctctgcaatttcaattcctgtctctgctacttcggagctacgttaccttgggcaagatgtttaatttcagcaagacccagtttttctcgtctctgtagaggggcaataaaaggacctacctgtgggtttcaggaattagtgaattcatggaaagcacctagcactgggcacagagcaagcacacagatgttgcctgttccaattatcactgcttcaggagacagttcttcctggagtctaacctaaggctgcctgcctccttccctgcctccgagggactccattcccctgatcaccatctctgtgtgacacagtcctcttgactttagctgcttgtctttgggaatgtcaaaactcaacactccagctgtccccggttcatgtagcccagccaggaaggaaccgggggagctgatcaccaactctcagcctcacacgtacctcggggaccccaaaacattttctggtggcccagcagactgaaaaagtctggctggggttttccccctttgtgcctgcagccaatgccagctgaggctttccctcctaattccccagatgcctgacggcgttattgccacaataaagcaatgacagtcccctatcagctctcaatcagcctagcctgcccttcacaaccggtttgtcagaccgccccgcccttcctcgttgttagctctctgcttgcttatctgctgctggagacagaagtctctggtttaattgtggcaaattaatgattgaactccacagccaactcctccccaagtgcacgacaatccctcccattgaaggcgccaagaaggaactcactgtcatcgccgagaccagagtcagcgggtgaaggcagcgaccagttctggaaccacattcagtcccacacccaagcagctgagcgaaactcttcctcctccacgaggcctctcccagcccttcagttcatgacgccttggtgagagaggtctgtatagcaacacggctgcactgaagcttcctttgtaggtcgatcgatggtgctgtgccacataaatcaccagcttatttctcctggcatgtgagcacctatgcccgatgagagcagatacataatcagtgttgagttaatgaaggagcacagatgagtctcctctcccgactcaatcaattttattgtataatggtggctatatatttaataacatgtaactcacaggctcggtttcaagcacttcctcctaataactctacgaggtaggtactgttgccatcaacacctgttttacagatgaggaaactgaggcactgagaggttaagttgcatgtgtaagactctaatgagtggcaaactaggattcagactcagcgtccacacacctaagcatcacagtataccccacccatgaggatgctacccttatataaaatggtaaaatgaaaacctggactctaccacccaactgaagatctagaagatgatccatgcctcactctgactttctttttctttttttttttgagacggagtcttgctcagtaacccaggctggagtgcagtggcgcgatctcagctgactgcaagttccacctcccgggttcacgccattctcctgcctcagcttcccgagtacctgggactacaggcgcctgccaccacgcccggccaatttttttgtatttttagtagagatggggtttcaccatgttagccaggatggtctcaatctcctgacctcatgatcctctcgcctcggcctcccaaagtactgtgattataggcacaagccactgcacctggccactctgactttctttatgcagtccttcaggttgcccttcttcttcttcttcttttttttttttgagatggagtctcgctttgttgcccaggctggagtgcagtggcacgatcttggtgcactgcaacctccgcctcccaggttcaagcaattctcctgccttagcctcccgagtagctgagactacaggtgcgtgccaccatgcctggctaatctttttattttttagtacagatgggccaggctggtctcaaactcctgacctcagtgctgggattacagctgtgagccaccacacccggcctcagttgcccttctctcttctccccagaacaacaaacacgctgaattttattactccctttattttcactgtggttttaatacatatgtacatgtccccaaataacatgcttagctttatttctgaacttcataaaaatatatttatgttatatggagtctgcaacttccctaccctgaagtcacgaacatgtttttctatattttcctccctgctcctccagtgttctctctctgcctcggcactcctaggtatgacctaagctattttaatttgtatttaaggatatattctttgccaaatgttatagagtttacaaaatagctccttgtccatctctttcagcacataatccccactcctttctttttctaacaatctggaaggctctacaatgatggcacccatgtttgacaaagggtttctgggcacttctgaacagcctgggaatgtattaatagttgggaactgagatcaatatgtcttagatgtttcatggcctaagggacaacagcacggtattgtgatgaggctaagaacaggctttggagtcaggcgttcctagggttgaatccctcgtgtcaatcagctgttgacacaagactgttgcaaacaaatgactggaacactcagtggcttaaaacaagggatatttcatcctgcatttgcagtcctgcaaggctgactgtggttctgtgatctacaatggactcaatgtgcagcttagcttgagtatgcctattgacggagcttggatcccaagccatgggttggtatccattatctactgctgtataactaccccaaaacttagtaccttaaacaacaattacgatttctttctcatgattctttgggttgcctgggctgatctgctgatcttgcctgggttcgctcatgtgggtagggtccaagacaacctcacctgtgcagcagtttggtgctggttacccactggggctcttccattctcttccacgtggcttcttctcaagcaagctaaacagacttcctcacaatatggtggacccagggttccaaaagggtgggagtccaacatgcaagatctctcaagggttaggctccagaacccacaccctttgcttctgccacattctattggccaaagcaagccacaaggcagcccccaggtgtgggatggtagagaaatagactcccgctcttgatgacacaagtggcaacgtcacactgcaaagggccatgaattgaggtccgtgtgattccttggttggtggggggcagcgcagggaggtgattaacacagtctagcacattcgggccctagtcgactcatgttttttctcaagccaagactgaagggcctgttgtaacctgggacacacacttcttcaggtgaccacaggagcccaaaccaagccaaagtgcacaagtacctggcagctagtactcctggtgtggttgctaacattccatcagccaaagcacatcacacggccaaggccaacaccacggtgcaaggatagcaggaaagggtgtgtgtgtgtgtgtgtgtgtgtgtgtgtgtgtgtgtgtgtgtgtgtgtataaaaccaaaaaataaaccaagctatcatagccccactgtaaattctcattcatagttgacccatcaaaaacatgggttgttttaaggcaaagtgaccaattcatccctatttgcttgggactttgttggatttagtactgaaagtctcatatcccaagaaacctctcaaacctgggcaaatagggatggtttatcttccctattttgagtactaaaggagatcctcccaatggctgccagccagatatcatcattatgactagccccactctgcagaagagaaaagcaacttttcagtggctgtagagacagtaggtggagtagccaatattcaaacctgaccctattgaagcagctctctcctatcatatgtttctcatgcctgttgcctccaaagtccttctcatttgaggtctccctggtctttattttttttgtattaaaacaatttatcttgttttgagactgggtcttgctctgttacccaggctggagggcagtggcatgatcttggctcacttgcaacctctacctcttggcctccagtgatcctcccacttcagcctcctgagtagctgggactccaggtgtgtgctaccatgcctggctaatcttttgtatttttagtagagatggagttttgctatgttgcccaggctggtctcaaattcctggactcaagtgatctacccaccttgacctcccaaagtgctgggattataggcatgagccaccatgcccagcctaaaacaaaatgttttaattggcaaataataattgtacatattcctggggtccatggtgatgtttccacacatataatgtatagtgatcagatcagggtaattagtgtatccatcatctcaaacagtgatcatttctttctgtcaggaacattcactatccttccagctatttgaaactatatattactgttaactatagacattctacagtgctatagaagactagaatatattcctcctatctagctgtcattttttatggatttcaacaaacctctataaaggggaatgagtttctctctgtaaagggagaaaccaagtcccagagaagttaagggggacatctgccaatgaggtatatggaatactggggccagcctgaaacaaagggtagacacaggaaacagaggggctaacccgtaaccaggaggaggccctgagagccagggaggaggatgctgcctgggcttgggctgggcttggctgagaatggctgaacctcagcactaagcctctcccatctcccatgacttaagctttgggaaatggcccatgagatctgaccctctagagttggattccaatcctgaactgggctctaactcactcactgtgtggcccagggcaagctgttcaacctccctgggcctccatttctctgtttatggatgacctgcctgactttccaagaatcactgggaaacggagccttggagttccctagagaaaggaggtgtcatagtaggctatctggccatcttgcaggtgaaccccaaaagagtggcttggtagttttttctcaaagaaattccacaaagaggaggtatgttgtaatggaagagtattggatttggcatcagaacaccaggttccagtcctgatttgctatttaaaagtcacccatcatctcaaagctacggtcttgcttgagtgtgaatcacaattcttgccttgtacaggaggatcaaatcaggcaggaatgcaaccacatcagtcacctggaaggaacgcaggcatccgcagaggagggggtgaggtgtggagtctctgcccgaacatcggttaagtggtgagtgaattgactgggatgaaactgatgaggatggtagtaacgatgctctaaagcacccgagttttcccccagttccctcagggaagccccactctgagacctgggaccgccactcccaaatccctgtcccagattctttccttttccgagggcatctagaggacaagcaccttctgatcggaatgttttccaaatactcaacatctggaaggagctgttacaaaggccccctttgtgtagccgggaaatgggctggcaataaaacagggccagaccctgccgagctgggaatggcagtggggagagggtgggtgagaggagcagcgcggaacaggctgggaggaggacctgtgagagcaaggtctccgagaggggtgtccgggcagcatgggacaatggagagtgaccattgcatatccagcgctttctatgtgctttctctgtagtgtcttatttatgtaaaagaaagtttcagcagtggtcacagtgaggggggaagatgtatctgaagcgtggtgggaaagatggaagaattcactcaacagtataacatttttcaggtcttgacagagaaggcagaaaaaccttccctgctggagtgttaaaaggtgacaacgccccaaccctgtttctaacctgcatcattcccccacttccttagagccatgtgctcagaaagcaggtccaggtgcccttgcaggagcctcctgtccctttgttccagcaggtgtctgtgagtctgtgtgcacgcccttgggggcttatgggacctataagaacagatgattcttcccgtctgttctgccacaaccaagcaacgctctgcccttccttgtatgccccctggccccaaggcagtctgaaaacacaagggagttctcttgatggaaacttcttgggagactgcaggcctgctatgcaaaagtcgcttcccaaaagccagaaagccatatgctgtttatttccaaaagtatctggaaatcaattcaggcagctcttgcagaatttcagaatctcggggctggaacgaatctcaggagcccgattgcaaatgggcagtggatggaccacctgctttagactccacgagggggcttgttaaacatgcagagtcctaggctgagccctggaaccacctggtgagcggggatggggagttggaatccagaaatctgcatttggtaagctctatgagtgatttttcattcaagtgtgagaagtattgatccaaatcctgacccagcctccaggacagcagcacttgctaaggtgagacacacggctgtttttttccattcttaaacatatctaaggctgcatgcatttccctcagcattcagaaaggctttctcaactttctttttttatatctaatcttagctttctgagcatcctccttgcataatttattgagcacagactatctactgggtgagttcattgcatattgcctttttactattcatggcatcctttgagtcacatacagttggaggcagctggagagggaggggaaaataagaagaaaggaagtcgtcggaaaagaagggaaaggcagagatgaggaagaccttcccttatctcctgcctttgggaacaataagctgacttcttggtgtgtcctggtcctttttacaactggagcagatagagtgttattgaaactcagaactgccacatttggaaaaactaaattctacttttgtttttccagacttcccaggccatattacatctttctgaccagttggatgctataggaagtcagctcagatgcttctaggaaaccttaggcttttgtgagaaaaagaaggcatgcagctggtactagcctcccctcttcttccagcattggacagtgcattcattttctagggctgtcctaacaaattaccaccctctggtggcttaaagcaagaggatcttattatctcagagttctggaggctagaagtttaaaaccaaggtgtcagtggggccatactccctccaaagcctctaggagagaaatttccttgcctcttccagctcctggtgcttcctggctgatatggtttggctttgtccccactcaaatctcatcttgaattatagctcccataattcccacgtgctgtgggagggaccaagtgggaggtaactgaatcacatgaacaggttttttctgtgctggtcttgtgatagtgaacatgtctcatgagatctgatggttttataaaggggagttcccctgcacttgctctcctgctgctgccatgtaagacgtgactttgctcctcattcaccttctgccataactgtgaggactccctagacatgtggaactgtgagttgattcagttgattgaacttctttcctttataaattacccagtctcttctttcctttataaattacccaatttattagcagcgtaagaacagatgaatacactggtattccctggcttgggacaacatcattccaatctctgcttctgtcttcatatggccttttcctccctgtcgttgtgtgtccttctctgtctcttataaggacacaatcactgaagctcactctaatcccatatgatctcatctcaatccttaactacctctgaaaagattctataaggtcacattctgaggttccaggtggacatggattttggtggaggacactatccaacccaccacagatagggacattgtattagtccattctcatgctgctataaggatatacccaagactgggtaatttataaaggaataggtttaactgattcacagttctgcagggctggggaggcctcaggaaacttgcaatcatgacggaaggggaagcgaacacatccttcttcacatggaggcaggagagagaagaatgagtgtgagcgaaggggaagcccctgataaaaccatcagatctcatgggaacttactcactattatgagaacatcatggcggaaacagcctccgtgattcaattacttcctaccaggcccttcccatgacacgtggggattatgggaactacaattcaagatgagatttgggtggggtcacagccaaatcatatcagacatgatttacagagccacggaagcctgaggggcagcatgaggacaaaaataagctaagaaaggcagagacatcaaaggctaaatgtgaagactctgagctgagccatgagctgtcaggtctggaaagagtcagtgcaataaaaacagcatggttcatattggctgtggagtcacccagacctgggtttaaattccaggccactgtcactttcaggagggaaacccagaagagttttctcatgcctttaaactttatctaacctctttgaaaactttatttgaggaatacacaagataacacactcaataattcactcacactccttgttctttacctaacagcagcaactttgccttacttattttcatatctcctgcatatgacacataatatacagtaattaatatttgtgggcccagagtaatcaaccaaatatttgttatgtgtcagtagctactttaaatattacaaagcttcagtttctaccagtgaaatacagggatttgttgggcctgggctactggagtgttactggaataataggccattaaagatcaggaaggcttccagttcaacgtggtagacgaagtatgcatgtgtgcccccactccaatctcacattaaattgtaattccccagtgtcaggggtggggcctggtgggaggtgattggatcatgggggtgggtttctcatgaatggtctagcactgtcccccttggtactgtcctcatgatagtgagtgaggtcttatgagttctggtcgtttaagtgtgtgcagcatccccccacccgtgctctcttgcttctgctctggccatgtgacgtgactgcttcccttcaccttctgccatgattgtaagcttcctgaggcctccccagaagctgagtaaatgccagcaccacgcttcctgtatagcctgcagaaccatgagcccattaaacctcttttctttataaattacagtctcagatatttctttatagcaacgcttgaatggcttaatacaacatgatcctttccactccttccctaagcccctgaaatgatagtaaacaaaattaaaagataaaaaaaagtcagaaatacaaggagaatgagagatgagaggacatgagagggttttgaaagtcagcagctctctcttctctcttccttggcgctgcctacggaggtggcagccatctcctactcagcgtcgtggctaccctcagacccctcgtgaagcccaggattgtgaaaaacagaaccaagaagttcatctggcaccagtcagatccatatgtcaaaattaagtgtaaatggcagaaacccagaggtactgacaacagggttcatagaaagttcaagggctgctcaacattagttataggagtaacaaaaaaacaaagcacatgccgcccagtggcttccggaagttcctggtccacaatgtcagggggttagaagtgctgccgatgtgcaacaaatcttactgtgctgagatggctcacaatgtttcctccaaaaatggcaaagccatcatggaaagagtagcccagctgctctcagagccaccaaccccaaggccaggctgcacagcgaagaacaggaatacacagctcacgtgcatgtcttatttgtgtttaaacaaaaccataaaaactgcctgaaaaaaaaagaagaaaaaaaaagtgtcagcaactgatttagctgattaaaaaaaggtgaagcacaactgactacagaggaagaggccatgcaaggtagccgacccacaccttgacacaccaggatgcaaggaattggatggagtcacctattgtctcccaaagcagtgtgtgcaatggggcagggaacagcaggcttccttgagaatctgtaccaagctaccggagctcccggatccccagcacatccctgccctgtgcaccaagcaactcctcatccgccacaacaggagacaaaactgaaccagggagagtccagatgtggagactgcatagggcaggggcagcacaaggaccagaagacaggggtaaaaaagaaatgtctacatgccccttcacctagtttgctcttcaaatgttagagaccaacttacaatccacccatgagaacggtctggatttctctgtggtaagatagatcatcccaagagaaaaccctaaacatagtgatatttaagagtctccagtgaaaagtggagtctctctctaagtgccctacagcgagatttaccagctctctggtcccatccacctccacccctacatccagagcattcaatgaggcaagcatcatcaggcagtcggagaaaattcccagtaggaaagacagagactaaaataagaaaatagtgtggggcagtgggggtggtgggagcagggaaggagaaagaaacctggagaaaatagggagcaaaagagaaaaaaaaagaaaaacggtgacctcctttcattattatccctggatagacagaagaaagaattgccttcaggaaagaagaacagaaggccacaagaaggaattttatggcaactagagcttttaaaaattactaagtttctcttattccttaagagaaacagtaagacagaatgatgaaaaagaagatcaaaccaggggttccaagatccaacaaataagaattccaaaagaagaacagaaaaaaattgaggaaaggaaattgtgaaataaataagaaagtgaacatgagtttccatattgaaatagatgatcaggggcccagttcaatgactgaaaagagacccataccaagaccctgtgtcatgaaacttcagctcattagacataaaataaccttcaaaggagggaagtaggaggtgaggaaaggagagacagggaaagagagagagagagagaaatttcatatacaaaagagaaggaatctgaagagtatggaacaactcaatagcaacacacaagatgagaaggtaatggagcaataatatcagatttctaagataaactgattttccacctaaacgtctgtagcaaacaaactatcaatcaagtgtgacaaaaacattttagaatatgcaagttctcaaaaaattttcctccacagaaaactatggaaggatatgctccatcagaatgagggagtaaatcaagaaaaaggaagatttgggagagcctggcagcagagtatttcattcagggattgcctagggtggcataaaacagatccatgagcaaagagacatttattgtgctcaaatacaaaagtccggtgggagcagtcacaacgcaacagtttcgtgatatcccaatgtgcccagtgctgactgtctgtcttgtattaccaaagctggtgtacagactccatcctcatgcttgcctcatggtgctatggtggctgtcccatctctagcttttcatctgtattccaggcaggaagaagaatgcagcaaatgagaaaagaacagcctctacctcagaaaaacaaaactttcttagaaaaattatcagcaggctactgcttttgtctccttggccagaattgtgtcgccctgtagctacaatgggctgggaaatacagtttttaggttggtatattagtttcctattgctgttgtaataaataaccatgaagagtggtttaaaacaaagcaaatgtattatcttacagttctagaggtcagaagtctgaagtgggtctcactgggctaaaatcaaggtgtccttggcagggccaagtgcttttctggaggctccaggggagaatttgtttttttatctcttccagcttctagaggccacctattttccttgactcatggctccttcctctgtcttcaaagcttgcaatggccagttgagtctttcacacctcgtacgactctgactcacattcttctgccatctttttccatttacaaggacacttgtgattacatctgtctattgggaaaatccagggtcacttccccatctcaaggtcagctggtaagcaaccttaattccatttgcaaccttgaatcccctttgccatgtaacataagacaatcacagcttttggggattagaacacagacatcttttttgtttttatttttatttttaatagagatggggtctcgctttgtcatccaggctggagcacagtaacgcaactgtagctcactgcagccttaaactcccagtctcaagcaatcctcccactttggcctcctgaagtgctgggattacagggatgagccactacatccggccaggacatagacatttttaggagacccttattctgcctactatctactatactgggcatagtagatatagttgcagcttggtataaaatctgggtcattttactttttttgtttgagacgaagtctggctctatcgaccaggctggagtgcagtggtgccatcttgactcactgcaatctctgccttctgggcttgagacatccttccacctcagtctcccaggtagctgggactacaggcacacaccaccaggcccagctaatttttgtattttttgtagagatgggggttcaccatgttgcccaggctagtcttgaacttgtgagctcaagtgattcacctgtcttagccttccaaaatactgggattacaggcatgagccacagtccctgacccgggtcattttatttagtatgaagggaagtgtgaatttaggcaggcacacatgctaaggattatggagtggaaagatgggaggaggcaggggtccccagtggtaccacagagtcacttctccaaacccagactgaacctctgctgtacttcaagttacacgagagacatctacccttatgtggttaagctgctttagcaaggctagagttccatgaagcccagtgtaagcccaaggaaactttcacgttttcaggtaagaattcaatagataatgtttaaaaccaaaacaaggagaaatgccaggatgagcatggtattgggaagtaggaggtaaatatcaaaagaaacatctaagtcagaatttaaagaggtgcccccagggagcagattcagagttggggaagtagagggcagagcatggctgacttccttcaaaaatggttttcatgccatttgacttactaaacttcatttatctgttattatgcctaatgaaaatcaatttttaatttaaaagtgatgataatagtttggagcacctatagcaataaactaggacgtgcaagaaaatgatctacccatgcaattcccccaaccgggctgcatcaggctggaagggtcatgaaatggttcccacaggggccaccgtggagcacaaccaggaggtgagacacagccttggcacaacagtggtccacatttaccttccccagcgagggtcctcagcatcctgctagccctcctgagctacaaaggacaggaagttggggcagatttgttttctttccctaacaagatcttattttaggagcagagctcagaagagcaaacagagaaaagaaaagtcaggggctggtttcagggagaagagtgaccacgggccattccttgggccatgtctgcttctctaagcctggccctggggaacaaaacttagatcttgatcatccagcatagctctggcatgctgagcgtgtgatacacctgtctctaccgtcaggcaaacgagtgggttcacaggcagaggcctgccctgccaaacaatgctcccctttgtccccgcccagggctcaggagccgcaaggaagccaaatccatcagcacttgtcagggcccttgatgcacacaatgcaagttatgatccacagtccccggcaaagccccaggcttccagcaggcagcattaactgacacgcaatgtgtcagtcagccttctaaaagccaggggtggggatccgtgccagggggccactgagctctcattcccagaagccaaccagagccagtgaaggggccgcagagactccgacacatcattttcataaaaacagcccaaggagagcattgcattaggaaaaatcatttcccgtattggcagcgggctcttctgatggctttagcaaataccatacacaccgaagcagtgcagtgcgcgcccttggctcatgtgcccgaccgcatacgggacagaccagggatgagggagactggaagtatgaattcccaaatcagactccctacaaatgcaacaccgcctgcaaagggtcgcccctccttcgtagccagcaaggtggcaggctttacagaagcaaggggattttgtgaccaaaaagaacctggaagcggcctccatggatgctgccaaggttattgtgtgcacttcttgatgcatcctgcaaaccactctgggctgtcctattctgttcggtcacctcctccctgcctccaccctcccaccacgtgactgccagtcaccaggccaggaatatcacaagcgtcttccttgggcaaacaaccgttcctctgcagacacctagactgaccttggcactcgacacagagggaggggacagaagacgagtgtgtgttcaaagtctgcagtcccctggggaggggtcactggcaccatctgccttcgctaccggggcaaggcaagttcagagctacaattagtgctgattcagccatggtccctcggtctcattccctaggcttccctacaagcctaattatgggcatgaaatgagctagtgaatgagttttcagaaaagcaaacgttcccttagaaatacaaaatatttgagccaaataatatcaagtaagattttgttgtttttgggcaaaggtcactgtttaacttaaaggaaagcaataaaatatatgcaatatataaattctataaattatagttatagagtaaattatagtaaatttatacagtaaattatagttatatagtaaattatatagtatcacttcttttggtgtgataatggtattggagtcatgtaaaaaagaatgccattccttctcaagatacatactgacctgtttatgaataaaatgacaagatgtctgtttgtttttttatatattttttttaattttttgggggacggagtctcagtctgtcacccaggctggagtacagtggcacgatcttgactcactgtaacctctgcctcccaggttcaagcgattctcctacctcagcctcctgagtagctgggattacaggcctgtgccaccacgcccggctaatttttgtatttttagtagagatggggtttcgccatgttggccaggctggtttcgagctcctgacatcaactgatctgcccacctcggcctcccaaagtgctgagattacagctgtgagccaccgcatccagcctgtttgtttttaataacaaggaggaggagggaagtgaatagggcaggactggccaagggttgatggttgttggactgtgtgatggggacatgagggttcatgacaccattctgtttgtttgagcataggtttgaaattctccataatataaggttgaacaaaaacacagtttaaagatcaagacagcataaagaataaatcagtgagtgtacaaacttatgcatgcaaatgatcagatctggccttgctttgaaattgtagtggctaaaacagatttggttttgctttttgtaaccagacagtaagaaggtgagggagctcctgtgggtgtcagacaataaaccattcactggtttttggttcttgtttttgagatggggtctcactctgttgcccaggctggcactcaccgtttttggtaggattccagagcaaaacctagtgacatttactctcaaaatatatctgctgtagtatcagacttatgtctaacaaaattagtgatcagatgggaggctgactatcctgaaacgggatacagtttgatcagggcagtaggtatgttttaaaaggacagactgggcctggcggccgtggtgtctcttgcctgtaatcccagcactttggggggctgaggtgggtgtattacctgaggtcaggagtttgagaccagcctggccaacacggcaaaaccctgtctctactaaaaacacaaaaattagccaggtgtggtggtgcacacctgtagtctcacctacttgggaggctgaggcaggagaatcgcttgaacccaggaggctgaggttgtgatgagccaaaaatcacaccattgcactccagcctgggtgacaaagcaagactctgcctcaaaaaaataaaaaatagaaataaaaggacaaactggtcaggtataatggctggcaacaatctcttttaatcacctggtaccctaaggtaaagcatccccaaaaacctcaaggatatttttattacttttgtatgttatttgagagagccgtaattccatttttagctggtgcattgttcaagctaatgttatctacttaatcttttcctctggctagtttggttcttagcaggttgtgttggttgagattaagattagagatgtaatatcaaaaccaccagttcagaacctgaattgtaacagacacatccatctgcagagatgctctttccttctgattggcaagattgtaacctacttctcaattgatttcagcatcgaacacccggggctggctcaattcctttctacacctgccaagaaaatctaagtggataatgatgctgaccaatcaatgggccgtgggcaacacaggaaatcagtgggcccgcaaaaagctgggcaccacgtgttacgggtaatattctcagggcccaaaatgggtggcaccagcctccctgaccagtcaaaggaggcaggaaatggaagctgagctcacggtgggaggaagctgggtgtgggtggtggtggcagccctgggaagagaagggtgtgtttctgagggcgccttgtgccctacctgtttgctgcagctttccaaaccacaaagccctgcctgcagctccctgccaaggctgatcataatctgccatgctatcggcattgtcatctcttatacagatgcacattgagtgcctctaattctgaggatgatcccctgaggaatcttgccttttcccagcgccatgctgcttgtccatccaggcacgtggcagcaacaccaccatagggatgcccaggatgccaagctgcatgcccgctacctcccctccctcctgcttcctcagcccacctcttctaccccaaccctgagcctcagaaggaggccgaaccatctgcccgttttcattcttgtcttttgcagttgggaaatgaatcttcagtgacagagcccacagaggaaaacacccaaacctgaccctccctttaaccttgcgagcgctatcactcagccagataccaccactgtttcccgaggactaagagagatggctctttgcctggtggagctgtgaggaagatgatgggaaacgggcatgctggcatcggagtttttctggattggaaaaagaggattttacttttcagcacctgccagcatgataggtttgccaagaattctacactaaacaaacacacacgcctacatcacccctcctcccaagcaggcataacccactggggaaggaaacagctcaggaaggcggatggcaggggttcgtgaaccttgctagtttccagggcacgatccattttaatctccgccagaggacttaaaaatctattctgtcaatatctcccttattagtaaagtttgggtcccaaagcaagaaaactaaggcttaattttgacttagaagattgttgttgttgttttattataagttttgattatgtagtatgtgtgtgtatatatgttattcactacatacatatttatgtatttttaatatattttatattttaatataacatataatacatattatatattatataatatgtaattatatattaaaatatataattatacatatattttaatacataaagtatattttaatgtatatataaattatacacatgtatattcaaatgtgtatatcaatatttatgtatatatttagatttgaaagccttgggggacatgtaggtccatatcctcttgtagatatcgtagtgggatcctggcttttggttatcgtctcccccaagtctcctattccctttccgtcccatttttttcttgcaaagaacaagcaatgactgaggctttcatagccattgtcacagaataggtcctgtggggagttgatttgtaaaaagttcctggaccaaaataaaggtggtgaccaaaatgaagtcatctctgccacctcccagtgggtatcgatgtggaaacggtaacttgaatctgaagcttctttgtgcccagccccactgtgctgatgagagcagacagggtgggagagaaaggggcacacagagtggacatgtggatgccgttcctcaagcccttgaagaaaccaagagttggccgcagccctgacccagagttctgggagatgggtccgtggtaaccccgcaagggagaagagggcaagaaggccaggattcccagggctcatccagaacagcccatccgtccagatgggtatccttgattccagtaccttccctgctcacacatctctttcatccattcattgtaccactctgaagtgtagaatatgcaaaagagagaataaaatcatatcatcgccacatgtagtttgctgtgtcatgcttatcctggtggatgaaaaagaggcccacgaacctatggaagccattcttgccacctgggtttatgagccaatagaccatggcagaggtgatgggatgtcatggccatgcttatgctatattacataagaccctcacttactagctgactcagtcgaggggctctccttgctggtttgatcagtaagcagccatgctgggaaaaacccatgtccctaggagctgaaggaagcctctagctcacagccagcaagaagcagggtccctaaacccatacctgccagaactgaatactgccagcaatgggagtgagtttgggagcagattcctccccacttgagcccctggaggagactatagttaggccaaccccttgattgcagcttgtgagaccctgaacagacgcccagttaaaactgtgtccagatttctaaccgagagaaactgaaataatcacgtgttgttttaatctgctagattcgtggtagtttgtcacacacaaatagaaaatgaatacaacgaccgtctcccaccaacttaccaaatatgataaatgttcacatggaagaaatgtacagactcatacatcatctattcaagtgcagtcctttgttttttaaccgtgttacaggcttgttaggaactgaaaaaaattacattttttttttttgagacagtctcactgtgttgcccaggctggggtactctggtgtaatcttggctcactgcaacctctgcctcccaggttcaagtgattctcctgcctctcactctagcctcccaagtagctgggactacaggtgcgcaacaccacacccggctgattttttgtgtttttagtagagatggggtttcaccatgttggccaggctgatcaggagcttctgacctcatgagatccacccaccttggccttccaaagtgctgtgattataggcgtgagccaccactcctggccaaaaatttacatttctatactttcacataataagttcagtaagcattttcattgaaacagcagaaagggagctggttctaattgaagacaaactttgaaaagatttaaattttactaatcttaaatcagttcattgttgttttccatgggacacactccagggcatggtggtgaccaatgcagtctgcaaacccaagtgcacattgaacccgaccctaaaaggcaaaggtcagagaaagggtacacctctgacctccttcctgcacaactacaaagtggaacccaagctttggctaagggcctcccctctttgcgtgctccccaggcttgccccacgtttccacttttccctgatgcatcctgggcttcttggaggtcatggtgagagacaggactagctggacttcctaggccgactaagaattcctaaacctagctggggaaggtgaccgcacccacctttaaacatggggcttgtaactcagctcacacccgaccaatcaggtagtaaagagggctcactaaaatacaaattaggctaaaagcaggaggtaaagaaatactcaaatcatatattgcctgagagcaccgggggagggacgatgatagggatataaacccaggcattcgagcagggagaggcaaccccctttgggtcccctcccttgtatgggagctctgttttcatgctattaaatcttgcaactgcacactcttctggtctgtgtttgttacggctcgagttgagctttcactcgccgtccaccactgctgtttgccactgtcgtagacccactgctgacttccacccctccagatccagcagggtgtccgctgtgctcctgatccagtgaggcgcccattgccactcccgttcgggctagaggcttaccactgttcctgcgtggctaagtgtccgggttcgtcctaatcgagctgaacactagtcactgggttccatggttctcttccatgacccacggcttctaatagagctataacactcaccgcatggcccaacgttccattccttggaatcggtgacgccaagaacctcaggtcggagaacaaaaggcttgccgccatctcgggagctgcctgccccatcatgggagcggctcgccaccatcttgggagctttaaggacaaagactcacctgtaacaatggctcttgtaatcagtgaagggagaggctaacttggccttaaaccccacggctgggtcctcaccacgtccaaacaggctggatctgctcgctccctgccaggaggagggaggccaatgagaaatgtatcattgtggctcatagtgcaccagagaatggagactatatcagaaaagaccccgcatgatttccaagctgatcttttaatctgggggaggatcacgggctgtggggatgctgggatacaggtccataggttcaccctctacaaagaatcacacatctttccttgggccacacaaagcagttgctcttctgttacaggaaaagggtcctgatccagtccccaagagagggttcttggatctcccgcaagaattcaaggtgagtccaaagtgcaaagtgaaagcaaggttattaagaaagtaaaggaataaaagaatggctactctgtagacagagcagccccaagggctgctggttgcctatttttatggttatttcttgaagatatgctaaacaaggggtggattattcatgcctctcctttctagaccatatagggtaacttcctgacattgcagtggcatttgtaaactgtcatggtgctggtgggagtgtagcagtgaggatgaccagaggtcactctcgtgaccattttagttttggtgggttttggccagctcctttactgcaacctgttttatcagcaaggtctttatgacccatatttttgtgctgacctcctatctcatcctgtgacttagaatgccttaactgcctggataggcagtccagtaagtttcagcctcattttacccagctcctatttaagatggagttgttctggttcacatgcctctgacacttccagctcttccacccacacacatcttccctgtcttggggcagagggcagtagcctcgtaccctgaggattcttgaaggtctggggtccgagcagctccatcagaagccccatcggggacctctgaggggtcagtgacagtccctggggacagacggtggctccccaggacgctttccctattaagccactggcagagtccagacactttcactgggttgagagctagaaggtcagagagcgggagagaatccagaggtaggttcagggttactgttttgctcagccctggatggccaggcccagcctcccgcattctactggaaggaggaggaagatgggtttagttcttcccagggcaggagagagaagcacaattgtgggctgggttcctcctgcctctgaacacagcgccatcccttctcccaggtgctgggctggggtgtgtggaagatgaaggaaaagtgaattaactaaatagggttcctgcagtgtctggaaagcctctaaacccccgagcacctcaggcttccctgccctgattcagaggtgaggttacctaaaagccaaggaagcctgggcttcggggaccctcactcacaggcccccttccaaaaaagccctgcacctaagcttgtactgggacttctgtattatttttcccaaagggcgctccccacgttgtatacacttccggcccccaaatctggatccaccctgggaagggacaaactgggggcagcctacccacattcggccagcggggggtccgaccggccttggtatctccaagcgaggtaacagtagtcgccccttgcgtccctccccctccggggcgcatcgccccttgcgtgcaaagccccggcaccgccacgagtctcgcctcgccctgcacaggtaaacagccgctggccgccggccggccgccctgcagggcagcccggggacctgcccccggcgccacgcccggcgccccggggaggcccagcccgcaggccccgccgactgggcgccgcgccctgggaacgtgcaccggggcaggcagcccggcctcacctggccccagcgcggagccggatcacacctgcctgctgggtgagccgagggcattcgcggaagggaagagacaagacctgggaagggacgcctgtggcttagaaagaccctcaggcagggccgggcgtggggcgcgctgataaaaattcctggagctgtattattcacatcgcagatttgtccctttgcctcaatctaaaaggaatgggaaagaacagccgctgggctctcatttgcttccagcttacacagattcaactatcaattatcccagaggagaggcgtgcagtgcagggcgttgggccacgaaactgaaagctgctggcgaggcgcgtgggggaggtcgatttctgcgtcctgctgcctccacgcacagtgagaacccaccccgccactgcgttcctgtcctcacaggtaaagtcaggataataatatctacctcacgggggattcgaggaagtggtgggagcgtaaagccccgtctggtagagtgaatacctgagcaatggccttccggtcccgtcttcagcacagcaggacgaaaatgtcttctgttgggatcccagagaagatccagacgctgacacctgcccctacctctctacttctcatcataccggtcacctggaagaagggtccattcaaagcaaagcctgtagccaatgagttgtttctgccatcaaacagtcaagcatatgaggcccaataggcagtcctgttttttttgtgacagagtctcactctgtcgccaggctggagtacagtggcgtgatctcggctcactgcaacctccacctcccgggttaaagtgattctcctgcctcagcctcccgagtagctgggattacagatgcacgccaccacgccggctaatttttgtatttttagtagagacggggtttcaccatgttggccaggatggtctcgatccactgacatcgtgatccgcccgcctcggcctcccaacgtgctgggattacagatgcgccggccaggcagtcctgttaagccatgccacacagcttaaaaaaagacactggcaagctcaagtcccgaagttaccagctgaaggaagagacttaaaccaaaccaagggcttcctatgacagttctgaaataccctcttccctcttgagtccatacaactgagaaaatagaacggccagtcaccgtggctcgtgcctgtaattctggcactttggtaggcagaggcaggcagatcacctgaggtcaggagtttgagaccagcctggccaacatggtgaaagcccgtctctacaaaaatacaaaaattagccgggcatggtggcgcatgcctgtagtcccagctactcgggaggctgaggcatgagaattgcttgacccgggaggcggaggttgcagtgagctgagatcgtgccactgcactccagcctgggtgacagagcgagcctctgtctcaaaaagaaaaaacaacaacaaaaagggaaaaccaaaggtaaaatttgatccacaggactggccacatttctacactggtaaaatcatggccttgctgaagcattgatcaggaagggataagacccagagaatccaaatggagacaaatgagaggatttggaaaacctgaagttctctgaatcacccagtcctcaaagagcctccttcgtcagcggaaaccctcttctccagtcttctgacacacttcgtaacgacactgccatttctttgcatcctttgcagtctcactgcaagagcaagccagttctcatgcattaccctcgactgtctccagaatggacagttagatcccagcacttcagaaagaaggacaatggcaagctcaaaccagcgaggatcaagattagaaaccaacatgattttgggattttcctaactaagggtgcttaataaatgggtggaaaggtatcattttacactggtctgatgttgttgatatacattgcagagattctggattgactgtgctagcaggagaagctgggagtgacttctgagctggactgaccactggacgccaagtgattatccctaatgtattacatgtcatttgcaacccaagctgtccgtcatgtactgggccatctgacacactcataaaatcccattaccaactggaaatggtttatgtgggactagctcctaaccaggtactgaaggcacaagtgcattatatgcataggtagatcattccctgtgtgcctacccctgaccctttcatcaatctaacaccggcctcaaaggggtttcccaagagctagtgactaagagaggaaaaaccactgatcctcatttacagatagcttcacaccatatgcttgcctacctttttttttttttttttgagacgaagtctcgttctgtcgcccaggctggagttcagtggtgcgatctcagctccctgcaacccctgcctcccgggttccagcagttctcctgcctcagcctcccgagtagttgggaatgcaggtgggtgccaccacgcccagctaatttttggtatttttagttgagacggggtttcactgtgttagccaggatggtctttatcttctggcctcatgatccgcccacttcggcctccctaagtgctgggatcataggcgtgagccactgcacccggccctaccttctaaataggtgactgtgatgttatagttcagtgaggatagcaggtgagagggagaacctcctggggaggagaatttgaagcacataactctgtgtccactttgcttggaagcaaagaaaatttgatgcaagaagctacaccaacttctgagcagtgtagatggggggttctgttcaacaggtcacaaacttgaaagaagaatgactggaggtttaatgacagaggagaggtgtgggaagacatacatggcttcacttctcagaatgggccaaatttgaaaatgtttgtttcttgagtaaaacatcatccaaaatacccactatagcaaaagctaataataattaattgaaccaggccatctgcttatgtgtaatgatttctttctccaggcacatcattgcttcaactgattcatgagcagaagagtctttgctggcaacacatgaactgtgatggattcaatcacttaggctttccattatcaatgcagacctggcccctgggtgcacagggttatcagtgaccacccctgaatgccgcaactgaccagactccagggacaccatggactacttagttgcagactgatgactttggacctcttccattatggaaagggcagtgatttcttttcactgaaacaggctcatgtctgactttggaactgacctctctgcctgtagatcatcatggcatgctctacaaaattgcttctgacaacggaattcactttacagtgaaagagggaaagcagtgggtgatacccttgtcaatggatcctgtcacccagaagcagtcatctgtattcagctgtgacatgatttattgaagatttcatttcaggactgagagacgatcatacctaaggagattgaaatatcgtcctttaagatgcttgtttgttctgaactagggaacatcacgtggtgccgtttctcccacagccagactaaacaggtctggaggaaggggaagtaggcacggtgcaacttccatcttacttaatgactctcactctcttcaactttttttccaccaattagcgattttattcccaggaaaggaaggttgcaccattgaggcagctgaccgttggggtggctccctttggaaaggggatataaagtgtttgtatgagtgatggttccattaaagcagacattttttaaaaaggtgaaatttggggaattagagtgaatatagatgttgaacagaaaaagagtgatatagcaatagtctggacatgtgggctggccacctggaatttcacatgccattaggtcaaaaaagtgggttgacaaggctggctgcagtgactagtcctgggaaaatgctgctataccacgggagacaggccagggtggaggctatgaatgaaactcaagtggttctctcaggagccgcctcctcctcctcctccagcggtgggagttaagggaagactgttaccatcatgcatatgggcagggcctccttggtctctgtgcccttaggaaagaggaatagggtcacggctagtaggtcacaccccagtcatctaaggtactggctgaagacagcatggacttggaatggaaactggaagcgggaaacctaaacatcatccagggtctcttctctagggcaggaaatgggtgctgtagcttctacttgtacttcctgtgttgtgtgtatcctattttaactcattgcctctctttcctctcccgttattcgttttattgtatatgggatgaacggttatggttaactttacacttcagctcaaagatacagaataatgagatgggcttgttatcccacggaggtggggtatccattactcacagaccttgagtacaggagttgaaagacattggggtaaccccgttggaaagggaatgaaagaagttttgattgtatgaggaatagctacatattttaagcaagagttttttctttaagtaaaactagaggaattagagtatatgttgatattgaacagcaaaagagtaaggctgtaatgaacttaatagacccttttttttttttctattttggctctgcaccatatgaactcattcccaaatttggaaaatccactattttgcgagtcttgggaaggggcaagatcagctagttcatgggcacaggatctaagctctggcagctggatgttctgatctagaacttcgaatgtggagccaggacacaaagaatccagctcagtgtagagtttgttcttgtggcggcagtggtggtggcatcaaggtacagcagtttcattagtggtgtccaggatctagggaccagctctggggaccatggcatctaaaccaagctgttctccaggtgtgattgggtcatggccccagacctctggctttcttggatccaacccattttcaagcccgattctccgaaagagcctgtgaattccctaacaggcttccactcatttccttttctgtttaagtaagctgctgttggatgctgttgttgcaaccaagaatctgactagcccttcccatctgagctctttcctttgcctctcctagtgttggatcagggaggtgttagttccaactttagttagctcttttatgatcatccttgcaaagaagcagctttgagaagtactgaacgtaacacaggtcatccacaacatcccctttttattgatattaatcacagttatgaggtcttgtccatcagaaagcacaatttgcattatgtagaactacatacaaagacataaaaataaaacatacatacaccaaccaccacaccagttaatctcaaccaatcaaacctctgaatgtgtcttcaattttgatcatcagtgcttcggaagaacgtacatagacccagcccaaggttggcctttggggtctgatagcattcacagagcaggagattcacccttggaagcaattgaatgtgtaaactctgagagcagacactgacaatgcaatgcctgcatacctgactcctgggctgccttccttctcagcagagcccactgaaagtctcacgtgtgcctttaaccaatgaggatggcaggccttatctgtgtttgaagtggacaggtcattgctacccctgttggagaagctatgtaagaaggagtaggctggcttctggtctagttcgactcattctttatagggacatttcagaatgatgagttggctaaaatttactttaaaggggaaatgtaaaattacctcttcttttcctatccccttcttcctttcccatcctgagccctctggcaaggcctgttgcagctcaagagtttttgtcagattataagttaccaaatggtcaacagggaaggacccacagcagattccaaaactctttcattcacttgagttaactgaaatggctccttctttgagtaattgaagagtttgagttctagcagtttgctggtgtctccaagtctcttagaaacatgatggctataaacttatcaaaataaatgcctaagaaatttggaaagcgcgacaaatggccttgctcctggaatccattgacagcagaggcctccgaacaaacccacactctgtctgtctcttctttccacagggctcactgtgagttcacagttgtcctcatcccctttccttcaataatgtcaatctttgcctttaaaaaaaaaaaaaaaaaaagccagactagccaatttccttccctttttctgtgtccccctcccatgtagtatctccttagggggaggtaaaggaagacatgctcctctctgggctggctcggccttggaaggtagcttgctatctttatgatgctccagttccaacattctagatggggagaggctcagcagtgatggagcaggaggggcggatgagaggtgtgctggccactctgccctgagtcactaggccaccaaaatgcttaggagacgtcttttggtagctcgcttctataggtgaccttgaggagttgggaggcagatagaaggtcccgaagtggagatttccctgatctgaagttccttgataatcccactgaagagagagtccattcagtggccaaaacaaagaatctgtatttccatgacaccttaaaattccccattaaatcaaaaatctccctcaaagcaaagtaaaaatggttctattataatcagagtcaatcaggataatgagatgaagaagagaggaaggaaaaaagttttaatgtgaagaaagaagcttgttgtcccatagaagccaaccactgctgtttcttcgtatggcctttcccggggtccgaagcgtctcagccctagcccaggccaacgtccagtgacatcatcactacaaatcccaggatggaggcccaggatgccagtttcccattaccactggaagagaaggacaggaagaaaagtaagaccttaatgatccctgaggccacggctaggctgaaggcatcctctgcaatgtccaattccaagagaaagcacactaccattaataatggtaacatttactggggcttactatgtgccaggcaaactaatgaaccatggaaccccaaacaacaacctcatgaggtcagtatcataattatcctcattttactggtggggaaactgaggcaaagagaagttacttgcccaaggtcacctatgatcgttctgtggtccatgtgtgagtaatgaagaggggtgattatttcttaaagatattacttaatctggccttttaaactagcctcagagttattcttctataaaaaccaaaataggctgggagcagtggctcaagcctgtaatcccagcactttgagaggccgaggcaggcagatcacctgaggtcaggagtttgagaccagcctggctaacatggcgaaaccccgtctctactataaatacaaaaattagctgggcgtagtggtggttgcctgtagtcccagctacttgggaggctgaggcatgagaatcacttgaacctggggggcggaggttgcagtgagccgagatcacaccactgcactccagcctgggtgacagagcgagactctgccattaaaaaaaaaaaaaaaaagaaaaacaaaacaaaacaaaacaacaacaaaatggaacaaagcaaacccttactcccaccttctgacacctggcctatagctagccagtgaagacatgcatgtatcaccttcactgacattttagagctcacctctcccttcattccagcccgagaatcgagagacaggatgagagagaatatacaaaaacgatagtctactgcatcaagggacggggggcaggtgtgtatgccactgcctggtgtcacctcatttcttgacccacatgcccttagcttcttttcttttagtttcagagagcacagttgaggaggcagtggggatgatcttgggaaggggcagagagggggagggaataaggaaaggaaaggcaaatgaagaaagagcatatcccaaggctggggtcccagctgggactgggacagggacagacagggagggaaggttctccaacctgatctgggcttcggggatgatgtcgtccatgaccacgtagaccatggcaccggcagcaaaggccagagcgtagggcaggatgggctcagccagcaccacggcaaaggcaccaaagaccccggccaggggctccaccatgccgctcagctgcccatacctaaggagagaacagagacatttaccaccgcagggggaggcaagcagacactccacgtgcccagactgttggctcaaccctagcacatggatgcatgccattctacgtcatatctgagcatggcagtgcaaaagcacatcactgttttgttgaaagaagcccacatggaggatgctgtgacatggccttgcccttgggcagcactcaccagaaagctctccaggtggagaagcctgcccctcgcaagggaaggctgacagccaggccctcggggaaattctggatcccgattccaatggccaaattcctgaaaaaccaagaaagcacatgaaggctgctgtctggaataggtgctcacacaatgggagtccctggccgaggccaagacctccgtgggtgctaggaagccaggaggagacctgtgacctgcagtaggagaggaaggagaaaggtcaggacgtgtgtctaggtaaagagcaggggctgcaggagggagtgacgtgagccctctacccatcatgctgtcctgggtcctgggcaggctctgtccttacaatgctttgctacagcacagaacacactggctggctctcagggtgccctgagttctgccacgtggctgtataactgcacttttcattttactttctacgcctctgtttctttttctttttttctttttctttttttttttttttgagatggagtctcgctctggagactccaggctggagtgcagtggcatgatctcggctcactgcaacctccacctcccgggttcaagtgatttccagctaatttttgtatttttagtagagatggggttttaccatgttggccaggctggtctccaactcctgacctcaagtgatctgcctgccttggcctcccaaagtgctgggattatgggcgtgagccacggcacccagcctacacctctgtttcttgtatacaatttagggacaacaatatctaccataaaggattgctgagtgacccagtgacccaataatgcctatcacatcctagcatagagaggtgcttaatgcattttggtttctattctgttacagcacagaaatgagtatatcacattttattcagaggccacttcagaaatgggacaaggaagtgcagctgcagacgctgatggtgccacagatctggctctgggctcagcttctccgtgggctctgcaggtctggcaccatcgctgcatttctttgggccccagtggtgctcacagtgatcctctcacctcctgcctctgcaggacagtgacaggctgtgctgatagatgcctgtctttgagaagctgctttctgcacaaaccaggcattggagtgtgagaggagggagaagcaaaatgggatgcgtacaaatgcaatctgtgaccacatgcctggcctcagggggcttagtatttagccatggagacaacacaggcatgtacatgaagaacccttattgtggatgctgcaaactacagcaaatcagccaaaagtcaacttgcacaggaaacagaggcatgagggaagcagaggagggaaatggggccagtccgagtgccttaggaaggcccttttgcacgtgagactctaccttggccggacagttccaagaagcagcccctccatgaagggccatctgatcaacaatgatctaaagggcgtgagaagagggtgccactcggcaagcaatgctggtgtgtggcccgagggaattgtgggtagattagatagagaagagaaactccaccatcaccgactttcaggtcaactggctcacgtccatccatcttgctgccaataggaatctacccattgctgcaagggagtgttgtagactggtagctgggacccctgcctatgacctgccccaggctcccgggactgggacacactcgtggccctgaaggtcctgtcaggcctgatccggctgaggcccaagttccagcctctaacaaagaacaccaaggcgaatccccagtttagcatctgacctccattttgtttcagggtttggcctttaccctgttttttttacctttatcccccaactcctgcacatgtttcattgaggttcgtagttccagatacctcaggaagaagtagcccccacctcgagtctgccagtcaagtagactcttaggaaaagtccagccctaacagaatctcatacctgtcaccacttagctcacatgtggttcatagaattagtgcccatccctttttgacaagattacaatgagcccctcagcatctacccatcagcttaaaatctgcccctgtgtgcaacagcgttgagagccactggcctaagcaggcatcatgggaggtgaggatgaggaaagcagtcaagcccacccccctcccaggagccccttccctgctatcccaattcccaacacaggctgggagccgaggacacctgtggccactactgaatgcatcaggagcctgcagcccagggtgcttactgtatacaagatctgatgtggagagctctggaggagatccggagcaacacaggacaggagtaacaaaacaggtggcattaggggacatggatatgtaacagaagtgatggagaatagtgagcaccccgtggcagggatggtccccctagggtggggttgggggaagaagccctgagctgacttaggagctgtggggcctagactggctgggggtgggaaactgtgaagagggacaaagcagcttccccagggggcatctgaaaagtgatagcatccgaaaactgatcagttccttaataaaggaaatattatggtctcttgggactgacagaagcattgagcctgtctctccaacctgcaggcagaactgttcatgaagtggagtggacagacaagaagacaccccaccacaccagcccaggacatgtccacaaaagctgcatcactcagcatttcccacgagtctacccaaatccctgtctatatcacccaagtttgtgctctcctttgactccttagagaggggctcaaacatgctccaacttcatccctggatctagggggcagcaaactttttctgtcatgggccagatagtaaatatttgaggttttgcagtccactgagtctctgttgcaaccactcaactctgacattgcaggtgcaaaagtggctatggacagtacataaaccattgagtgtggctgtgttccaataaaactttatctacacaaatgagtggggggccagatttggcccatgggctgcagtttgctgacccctgccctgatagctcagtggctgcagaaagatctggcaagatgaaaccacagaccctgggcattgcagaccctatctcttcttatgttctcatggccatgcatgtggtagttgaagtttgggctttgcagtctgacttcttctgtccaaatcctgggtctgtgctttgttagctgtgctactttccatttctccaactgcagaatttgaagaacaatacccaccctcacttcacagcgttgctgatatgattacctgggatggtccctctcaagcccttagcacacgggagctagtatgcagtaagcacgtaatcaatgcctgtcctggggtgagggtgagtgttatcactgaggttgcagcgtgaaataacagagacagggacttaaagcttttccaagaactcatgcgtcctctttccaagagagactaagattttctaccctaaagccaaaactcattcctctgcaaagctctgtttcaaagagacctggcttggctgttttgcttatggctcatctatgcttgagtttccatcggcactcactcatttgctcttgttgacacttgtgtgagatttttacatcacttgtaagattttggtgagaaccactgtgcaacctgaaggcatttcagatactgtgttcctatatactgcttggtctgtttgggttgtacagaaactcccgggagatgtggattcttgcttctcctaggctggcacatatagaagaattccttctatcacctccagacccccctgagccccagtaaatgtctggaggctggacgcttccctgggcacagaggaggggagagctgctggaagggagtagggggcattctgatgagcctggtgggcttgactcttctgttgcacgctttttttttcttttttttttttgagatggagtctcgctctgtcatccaggctagagtgcactggcacgatctcagctcactgcagccttcacctctggggttcaagcgattctcctgcttcagcctcccgagtagctgggattacaggcatgtgccaccacacccccctattttttttttgtatttttagcagagacagggtttcagaatattagccaggctggtctcaaactcctgacctcagatgatccacctgcctcagccttgaaaagtgctgggattacaggtatgagccactgcaccctttttttttgttttggtttttcttttcttttcttttctttttttttttttgagaaggagtctcgctctgtcacccaggctgaagtggtgcagtggcgtgatctcagctcactgcaacctccgcctcatgggttcaagcgattctcctgcctcagcctccccagtagctgggattacaagtgcccaccaccacgcccagctaatttttgtatttttagtagagatggggttttaccatgttggccagggtggtctcgaactcctgacctcaggtaatctgctcgactcggcctcccaaagtgcgggattacaggtgtgagtcacctcacccggcctgctgcactttaaagtatggaaagctccattggataattgagccctgggggtcacctctgaagattttgtcctgggcagctggggacagttttacacttccctgagaagtgcttctaggaggtgaggccctgggcaggaagtcaactgtagcttacatatcctccacatagtcttgatctgtcctagttcaacaggagagaaggatttggagaaatgagacaggatgaaaaaggaaatctagctacagatgtttaggaaaaaggtgtcattctggtcccttgtgtttaaaatgtgcgtgtgtgtgcggaagggtggggcatggggagtgagcgggtggccctgcttagccatcttgcttttccttattttctgggtccctaacatgtcttcctagccagtctataggggcaggacaaaagggtcaggagctctcttcctcaccttgaaaggtcctaggctcccctcttctgctgctctgccagggagggtgatgggtgccgcttctggcattgggtataggatcggagttaatggcctcacttcttccctctggggccccaggcctaggactcgaaagctagctttggaagacactgttgaacgttgcttcagttataggatgctgacaagcgtgttctaaccagccctgggcagaaatgcggcctgttctcgcagcttctgctaccaatttcatgtgcaagctgaccctgagctcctattccaggagttggagacatgtgaatatatttatgttgaggacaaattcttaaggataaattcttgccaatatttcataagcccctgccccgccttcccagatagaccctcaggggggccccttccctgcgactttgttcagcatctccttgtagccctcaaaatggttgagtgaatacaaccagcttccttgaccttttgcaaagtccgaagtgcaaggtttctttccaatgaggaaggccaaggcttctgatatcttgggctttgccaggcacttggtggctggctctcagtccgctgccattgcctgcacctcatattcacaggcaggcacacgaaggtagccgcagagtgaccagcccaatgtcactgacaaatcagaggtggggctccccatccaaagtcctcgccgtgacatagcgctgactacagccatcgcccggcgggctgtgggagcctcctccacatcctgtctgggagccaccatcctgataagcagcacagaaaccccattcttccatccctggcaagcctcgttacctctgccttgccccagccctggcacggggctgccagcccaaacagctgccatgccctctggatcctgccaggcctttctcagcagggcattgcattgctgggcggtcagagtccctcctgacactcctgggctcctttgctccccagcaggggctggcaccacagtttctctgcctttcctacctgtcatgcacaacactgcctaactgggctctcctccacacacccgtgcacacgcacaggcccatccaagttccctcgccccgctgcttgttgggcattggtcagaggcccactggtgggggtggcccagtggaggacacagtcccttccagccctctcctcttcttcaatcacctgcatcagctccagagtgggatttgaatccacggctctcagacctgacgacacatgccagtcacagggagcaccggcaaatgccgatgcctcggccctgccctggagatctcggtttattgccgtggcattgggccccctgtgtgcagattttaagagtgtgcgagggcgttgagagccactggcctaagcaggtgtcagaggaggtgaggatgaggatggaggccaagcccgcctccctcccaggagccccttccctgctattcgaattcccaacacagtctgggagccgaggacacctgtggccactactgaatgcatcaggagcctgcaaccggggtgcttactatatacaagatctgatctggggagctttggaggagatctggagcaactgagggcaggagcagcaaagcaggtggtattcggggatatggatgcataacagaagtgacagagaatattgaggaccccgtggcagggatagtctctcagtggtagggggtgagccgtgagctgacttaggagctgtggggcctagactggctggaggatgggaaactgtgaagaagaacaagggcagcctcccggggggctggtggcgtggaggatgccccaggctcaccagctcccctcctgcagccctgctgtgcattcctgcaaggccttcagtctaactaaacactctgagctgacgatcctgggcaggtggggttggtgggccattccctccctcctttacgctctgggaagggaaaggtcagatgagaggtttcctttccaggatgggccatgaaaattcaaaacagcattcaaaagccacggggaaaatacaaacccatgcccttctgaagacagtgaagctgctgtcttctgggttctgttcctccccagcagtagcacaaagacactattactagtctggaccacgacacattaatgggaaggagagggaagtggagatgaagggctcttttagaaaagaaaccgcaggctgtcccctgacaaggtcccttgtcccttccgtgacaagccaagtcccatggcaacctgtcaccggagcctgactgagagcaacaaggcagagatctctcgagaagggccaggagaggggcatccgtgtgtagagtgggacaggagaggagagagggagcgtggaaagggaaggagacgggggaggcgggaagggagggtcgacagggcagggagtcattggggaggaggatgactcctggggttgggctgcaccagcaaggacaagagcagccctgacaggcctctcccggggaggtctgtctgcaggggctgcctcatggaggcagagtttgcctcagggcatccagacttctcttttccttttccttaggaatcagaatttgctaggaagggacaaaaccagagaaccgcgaggaaggggggtcccatccagcattgggggaatcagggtttatttttaaagttcatttcctattatatgtttatttttattattttttttaaacatcgaaggccgggcatggtggctcacacctgtaatcccggcactttgggaggctgaggcaggaggactgcttgaggccaggagtttgaccagcctgggcaacatagcaagaccctgtctgtatataataaataaaaataaataaaaaagagaaaaaagaagaacagcaaagaacacaattatcaggcatatttcaaaatcattcctcaaaaaaataaataaataggccaggcacggtggctcacgcctgtaatcccaacactttgggaggcagaggtgggcagatcatgaggtcaggagttcaagaccagcctggtcaacacggtgaaactccgtctttactaaaaatacaaaaattagccaggcatggtggtgggtgcccgtaatcccagctaccaggggagctgaggcatgagaatcgcttgaacccgggaggcagaggttacagtgagccgagatagcgccaccgcactccaggctgggcaacagagtgagattctgcctcaaaacaaacaaacaaacaaacaaaagataaataaataaataaaaataaacatcaaggaggagcagagatggaagagagaatggcaagaaggaagactacagaagatcacttgactgccctgactttgggcaggagtgagtagcaatggtttacctcattagaatgtacaggccaatatgttaagaggtcagaattccctgaatacagtgtcccttttgggacaggaactagggtgcccaaccattccggttcaccagggactgaggggtttcccaggatataggacttactcagtgctaaacctggcacagtccccagataactgatgtgagttggtcaccctcagaagtagtcagaaacagggtaggtggcagaggcaagctagggtaagaattttaattttccacaggggatatatacagaatcctacaagctaagcagatgtttgaaaaagtaaaaagccctacctaaaactcgcaatggtctgatgcaaattttgaccgcttttagccccttggatctactgccctctagagagccagcttccctgaaaccctcaccagccccattgatgctgggtgggtccttgcgggctgctgtctccagcccagccctgagtggcatccaggaactgggcaggcacggcagaagcagaagggatggcctccctgtagggacagcagcagacactttgctttcttgggtagggacataaagaaacaattcaggctgcttaggaaacccccagaggtgacctgtaaggaagtggggaaggcgctgggcctgagcacaaataatgaatcctagaagatggaggggggctgggcccacaaggggtgccaagggagtgtaggcgggggaaaggtgcccattcatgggcttggcctctccgtgggctggatgcaggggcagaggcggacagtctgaggtacttttccagaggtctctcatcctttgctcttccaacctggtagaggctgagggccaatggccagggtcccatccgggtgctaggtaagaagggcctccctcctcgtatcttcagggaacactaatcccaagcagtgggcaacaggaagaaaggcatccccggtgggcagttgtttctgctttttcttagaggcctgaccctgtttcgccccaggggctgacttctcttctccagcatcctcctcctactaccccccacccatcacccatgttaaaagttagggcccttggaggtcgcctggctcaatgccttgattgttaagattgttaaggtagaaaaaggagatgcagacaagtacaatgcctttggaggccctgtgatgtgtagtgccagtcaaacatatgagtcaaacacatctgggtgggaccccaggtgcacaggtgggacccagtgcaagctacagatcactcagcctttcctttaactgaaaaatgggcataaaactcccccaccgacagggctcttgtgtggatggcaaatgatcactgtgaagtgccaggcttatctcggagcccagagtgggtgctctttaaatagcagccactgttaaaactgcccgaggctgctgaatgaggcggtgatgagctgggcactgaagcctcctattccccccagactggtgacctcccagccacacaccaatttcttctacaaagggtgtgccttagccttctcaattatacgacctcctgggcagaaccatgtcctgcagtggcaacttggccacctggaagcctcttctcaggagtcactccagagtcaaccgctaagccctggccatgtgcaagagctcatgccacatatgaagaaagacatttggaaggtccctgtcttcaaggaacttataatctgatacacagcaaaagacctgcctgcaaatgactccagcacagcacgggacttgctaaaggccataagatctagcacagagcattaggggcgaggatgattttggcggagacagatgatccaggaaacctttgtggagaaagcaacatccaagatggactgtgaaggatggggacaattttaatagataaagatggggaaatgcatttcatccagaaagaaggaacagagaaagcaaagatgtgagatgatctggcggggtgagctaggtcttcctttctctccccttctccaagtccaagccaacatacaaacaaaaataaaacatgcattcgagccaaggcctatctctcttacacgtgtcctctgtgactctttttttttttttttttttttttttggagacagagtcttgctctgttgcccaggctgaagtgcagtggcgcgatcttgggtcactgcaacctctgcctcccgggttcaagcaattctcctgcctcagcctcccaaatagctgggattacaggcacctaccaccatgcctggctaatttttattttattttatttttttgtatttttagtagagacagggtttgaccatgttggccaggctggtctcaaactcctgaccttaggcaatctgcccgcctcaggctcccaaagtgttgggattacaggcttgagccaccatggctggccctctgtgattctttcttagctgaacctgctggatttttagggaaaacctgagtgttaaacaccccagccatacctcaggtgttttccaaggccggagtgcgaagtaccaccccaggggtccctatactatctttgggaggcagatgcctgtgctgagtgagttactcaggggtgttcccttgaaattcatttattagccatctccactcaaacctcaatgtctcaggccttgagcttgggaaatgcttccagctcgtgtcagcagcagcacagagcatgtgccaggagctgtgcacagcactggagaccccactgcaaccgcctgcggttgaaaccagctcaagtctttcattaccgcacccatcagaggcagcccgaggtcctccggctagaataaaaatgacgataaccactgctgttatttattgagtattactacgtgctgggcgtgcttgtaagcatattacatgtaacaacatgccttgcccctcaaccacctcatgagcagctttcaccattattcccattttacagatggagaaattgatgctcaaggagttaaataactggccctgaaggttgtggagctgggaagtgacagagcagggcctcctaactgctactgtgtacacataccgggttttctgggcctcatgcagacccatcgaaccatatggagataggggcggacgctgcccgacacccacttggctagtgagctgaggttctggcctcttctggtcaacagggagggcaggccagactcagggggtttcgagccagagacctgcagggtttaatggagtggaacgtgccatccacagcgggatttctcaacctcaccactactgacatttcacaccgtgagttccttgttgtgggggcctggttctgtgcagtgtaggatgcttaccagcatcctcggctcctatctgctagatgccagcaacaacctctcagctgtgacaaccaaaacgtctccagacatggccaaatgtctccggggagggggaggggaccaaccctgattgagacccactgaccttgagtaaacatgttagatgagcttgcttccttagcaaatagctggacgacaaaaactgctcagactgagtgtggagaacacctgatctcacgcatctcatttgagaatttctagcctcagtggagtgcaggcttctagggaacttagctatggcacgacagatttggggctgagcaaccacctttgagaaccaccaggcctcagctcccttagtccaaagccagtggtcactctcaaagctcactgttgcacaattccaggggtacttttcaccttgtgttctctgaccatggcgccccctggagttgtgcagtgggacactcctgcttgagcgcagattgctgctcagcctggggtgtagttctggggttcgaggtgcacgctctcaggagaggtagtggagagagtcatgggtttctctgagaattggcaagcgaagggacggcaacctgcagccttgctctccaggctatattccctggccggttgattatgaaaggagaatggcatatccctgacaagccctgcttcaccccggctttcagatcctcccatgtgcgatgagcgtgtgtgttcttgtgtggcaggcccttacatactgttttgattgttatcatcttgccgtgaaaggcctgattgttcaggcctggagatgacatcaccggcttcccactagggcagcctgtcgaggtgtttgatgagcctgcaggtgggaaggggctgggtactccccgcagggctgcccggccctacctgctcagaggagctggcttagcacgcaagggatcttcccccaccctcttggtgcagttctcggaaacttcttggtgcaggctggcgagatgagatgacccatccattcccttacagtctgctgccttccttcgagggggtgaggaagagcccaaggaagtcagccggaaggcagggtggtggctgagggtgattcaggccaccactgtgcacttctccctgcagaagtgtagacaaaccgcccacatttctatgggatcactgactcccagaggaatgctctgaagaccttcacctgctaagtgtcccagcaaagcaaaccaatcctatgggctagccaagtatgaggctgcctcatacaatgtggtgggggcacacatctgagagcaatgtgcctctgtagccatcaaaagacacatcttaaactgggcgcagtggttcgcgcctgtaatcccagcaactcaggagatgggtgggaggactgcctgagcccaggagtttgaggctgtagtactatgatggagccatggcagtccagcctggactggccaacagaatgaggcctttttttagaaagaaaagaaaggaagaaagaaaagaggaaaggaagaaagaaaagaggaaagaaagaaagagagagggagagagagaaaagaaagaaaaggaagggaaggaaaagaaaagaaagaaaaggaaagaaggagggaagaaagaaaaagaaagagaaagaaagaaaaagaaagaaaagaaaaaaaagaaaaaggaaggaaaggaaggaaaagaaaagaaagaaaaggaaggaaggagggaagaaagagaagaaagagaaagaaagagagaaagaaagaaaagaaaaaagaaaagaaaagaaaaaggaaagaaaggaaggaaaaggaaagaaaaggaaggaaggaaggagagaagaaagagaagaaagagagaaagaaaaagaaaaaagaaaagaaaaaggaaggaaaagaaggaaaagaaaaagaaaaggaaggagggaagaaagagaagaaagagagagagagaaagaaaaaagaaaaaaaggaaggaaaggaaggaaaagaaaagaaaggaaggaaggaaggagggaagaaagagaagaaagagagaaagaaagagaaagagagaaagaaagacaggcacacacatcctgggagtgctgttattcatggcagtgctatcaataatagtcataaactggaaaccatgcaagtgcccctctacaacagaatgagtaaaataaactcattttattccttgtgttctattcacacaatggaatactgtgtggcaataagaatgaaaggtttatacctctgtgtgagtctggagccacgtcacagacacaattctgagtgagaaaaactagacacaaaatagtaagtgttgtacagtcctatttacacaaagtccccaaacaggcacaaccaagctatgccttcttagctactaatttaatggccattagcccattggcagtttaatttgttaattctccttaacatatttgaaattttacaaacaacacgtttgagcagaaaccgacaactctctaaaggtaggatttcagttcctagggaggagtcatatttttgggaaaagagtatcttcccattacctttttaaaaagatattttactgcagttgaatgtatgttcagaaaagagcagatccgcctgcgttgtacaggataacgtttcagaaactaagcaaacccatgaaacccacatcccgatcaagaaacggaacatcaccagcaccctgagaccccctcaatcctgggctcctgctcctcatgggcctctcctgaaggagaatcactatcctcacttctaacagcagagcctagttatatgtgattttgaactttatatagatagttgaggcagcagtgcaaggccccagaagaggatcgcctgggggtctgaatgatgagggcctcagtctcatttcctgcggacctggcatgtggacagtctccttagatcatgagtttggacatccgtgtggggtattgcctcaggatatgaacgtctgtcccgcgaagcatctctcactccagtttcttattcacggagggcttcagcctctccatctgcagcaaacacatcaggggaggagatgcaaccaaaacatttagttccccagctctcaaaatactatcgcaaaccactaacaatgtttccagaattttagtgctttcttcttgagagcttgtttggaggttctagcaggggagcgcagctacttgtatacccttgaccgaagaccggtcctcctctattggggatggtcgtcctcttcaaccaagtgcacagcttcgggagggacgcacatggagcggtgagggaggaaagggacacccgcctagccagccagatcagccgaatcaaccctggcaatcaatggagtgacagatgtcacagccagattgccctcacatccttagtgctttcttctaaggagctttaagtgcctttataaacagttattatttctatgacagaggaggtccattttctattttgtagatgtagtaaccaaggtccacaaagggtaagccatggactgaaggacacgccgtgggtccctgcagtgagggaaaggatgctggatgccaagccctcttccatacctcattgctccacataaaactgcagaaggcagggagggaaagtggtcagtggcagctttggggaagaggagaccataaaccgtggtgccattcttggctactctctgtcacaccttatatgcaatttgccagggaaaccagaggcggggatctacctttagatctgatgagaatccagccacttctcccctcttccatggctatactaaggtgcaagcctccatcatgtccttcctgggctacagtaacagcctcctaaccagtctccctgcttccacctttgcccctataaactctattctctgcaaatttgctaagtctgattatgctgctcctgtgttgaagacactgcagtggctccccattccactcagggccagggcccacatcccctgctggcctgtaatgacttacacattcatgccctccgttctcttcttctcttctgatttatcttctctccattctctcttctctccattcttttctccctccattctcttcttctcttctgatttcttcttctattgatctcttcctagctccagctacaccagccatctggtctccttgctgttcctccagaatgcctggttacttctaccttggggcattttcactggaacattccttctcagttatcagtggctcatttcttcaactctttgaaggcaaggccacaggaccttcccaaggccagatcataaaaggcttgtagcttctttctctcttctctctctctggactactagctctgggggaagccagttgccatactgtgagaatattcaagcagccatgtggaggtgcctacatgatgaggaactgagacttcctgccaacagccatgggagtgcgccatcttggaaatggatccttcagccccagtcaagacttcaggtgactgcagccccagctgacctctcttgattgccacctcatgagagaccctgagccaggaccactcagcaaaaccactctcagattcttaacccataaaaaaattgagataatctttgttggtttaagccaccaagttttgaggtgtttttttttttttttttttttgagacagggtcttgctgttgcccaggctggagtgcagtggcatgatcatggctcactgcagccttgacctctcaggttaaagctatcctcccatctcagcctctgaagaccaaggcatgtgctaccaggcccagctaattttttaaaaattacttttatagagatgggggtctcactatatttccccggcttgtcttgaattcctgggcccaagtgattctcctacctcagctcccaaagtgttgggattaaaggtgtgagccaccacacccaaccaagttttgaggtattccgttacgcagcaataagtaactaatacagtcaccttctcaatgaaatctaccttttttctaaaacctagtctttctctttctttttctttctttctctttcttttctctctcttccttttgatagcatttattatctcctaacctactatatataaggtattaattgtttatgtttattatctgttctttctcccacacctgacctcacactcaaacaagctaggattctctgttcactgatttatcccaagcacatagtcaaatgccaggtgcatacagcaatgaaacagacatgtgtgcagatgcacgtctaagagttctagcaggtctgatgtctgctcccagctgcgtgtaatcaatcagcagggagcatgtcacaattctctgggcctcggtgtcttcagctgtaaaataaggaggttaaattgggcgacccgtaagttcttttccagatcctacgttttgtgatccctaaacaacgagggtattgtgggttctctagattccaggggttgcagagacaggcctctgcctttgccaaagctcattttcctgtccattttccgtgcacatctggaaagccaaaaagcaaaaccatcgcattgtgcacatctggacagcataaaccgaccactccaagaggaaactccaaaacggctgctcagcaaaacggcagtggaggccaaatgagaaaggttgaaagggctcctttcttttctacccgcaaaacaatcttctgggcacaatcttaggagctgaatgctttgccgctgaataacatacgctctcaataggcttcgactgcagtctctgtcactttgctctctgcctggctcctggccaatgcaaaacatacagaagggggctttctcccccactgcccccttgtttagacggatctataccttcacttatccttggggcatgtggcccaagttcaaagctgaacaccaacaccacctgctcctcctcttccttcagggagagtgattgaactgcacgcctaatgcaaactaaagggggagttttcagggctcgtgagaaatccttggctatttgcatgcagttagaacatgctcccttccctccgtggctgagaagagaaagctgcctggcagtatgtagtcttgttgtttgacaaccagcttgggattccaaaacaaacaggaatgattattcctattcctttgcaaatgatttgaggtttcaggggcattgaatttatgcagtgcagggagagcgagaggcatgtcctgaaatgtggggtgcttcccatttgcaccttcagagctgataatgtccagggcttgctggggaggacactttggagcacaggaaagtttaagcggcaatagagagcctttgagtcaatgtcttgtgaatagcaggggatgcctgcaaggggagaataaaggtgaatggagaccttggggttagggtcattctctagacctccctgaagggtgtaggtgaagaggcaggagcaagatgcaggaagttaatagccctgaagtctagccctggaccctcaccctcaaacagcggcatctccgtatgactcaggacactctatgaggtgagactcctgctgttaccctgaagcctaaccatatggaaagcacatggcctgctgactctaggtgcagggggcgctttagaaaaccaggcgagaagctggcaagaaaaggaacaaaagagaaatcttttccttccttgcactgtgtatttttggacttgctttctagctagccagggactcagtgctttgccattgggaaacaattgtgttttcttggcttcccagtatggatggctgagggcaagtgcagggtgcatggccaggacgccagtgccagtagggtggctggggatatcatcagctgggaggctcagcacctgctgctttgcatatgctaccaatgctatgaagatggtgggcaaagcaaccaccctcaccagagccacttcttccaggaatgcctggtgcagactgcagaggcaccaggccaatagcaaccatggcaggaacaccagcactgcttactaagcccctgccctacaccaggcccaatgctaagcactgttcatgcatcttctcatttttctctggcacttgctctatgcagaaaatattaccaacccattttatagatgaagaaactgaggcttacagaagttaagtactctctcccaagttcaccagcctgtaagcagcccagctgaaatttcagttcaggtctgctgactccagagctcaagggcttcccctgtgtggccatgctgcctcccatattcctgcagaaacagtgcagagtgagggtggatcttgctgtaatcttggtttagggtagcctgtgattattagcaatactttgtaccatgaaatcatgtattgccaattttcctctgtggggtggaatctgacacagacaatgtgaaagatttctataaatattaatgctgtttgctataaatattaatgctgtttaagaatcttttaaaaaaaaaaaagaagtttccagtattttcagtgactcactggcttctagcacatacctggtgggcttttctctcttgaccaagtcagtaactataaagcaaaaaaaaaaaaaaattccctagctctgattagatgctgagtttaactggctctgacggatgccccaggaaatattcccaaggtgccaaactccggtcttctgggtgggaggaagccaatgtaatacttttatctctgtagctcttgctggtcagtccccactgaagtttgcaaactctgtgtgctggtttgtgcaagagggactatgaagctggttttgactttgcaaacagcacagacctctgagggataactcagcaatgtgcagaggggtagaaaaaaggaatgagaagttcaaagtgaggagagagagcacaaccacagctatgaatgggcatgaaggaaggagaaaagttgggaccagtgtccaccacatggccaagaaagtgtaatcatgcaacaactgcttggtccccacctggagagccactcacagacacacagtgttcagagcccatcaactcagagctgagacttaataactaatctgtggaaataggagtttatagcaatggtcttctacccctgttgaaaactgcatcctatggaagacagccagttctcagggcccttcaaaaatgtcagtgtcatgtgagacagaaaaggcagggtacctgtcttccattaatggagattaaggagatgggacaaccaaagcaaacaaataaaacgatacaagggaaacacataaaacaatagcaacaactaaccaaactaacaaatccataaaggacattgggaatgttaagaaaacctgaacagggtcagtatattcgataattttattatatcaatgttaaattttctggatgggataaccatattgtagttatgcaggagaatgttttgtttttgtttttctcaaagttatataggttgctctacctcaagacttctcgaaaatgtacgtaactgtaagacgatgatcaaaactgggaaatcacattggcacgacactatgaactaaaccacagactttattcaagtctcatcaattctcccctgacatccttttgctatttcaggatccagtgtgggatcccatgttgcatttagttgtgatgtctcctttgcctcccctactttgcaataatgtttcagtctttccttgattttcatgactttgaagagtgctggccagctattttgtagaatgtctctcaaatttgggtttctctgatattttctcatgattacattgaggttatccttttttggcaagaatatccagaagtgatatgtccacatcagtcagagggcacaggaaaactcgatgtgtcttattcctggtgatgccaaccttgatcacttgcataaagtagtttgtgctgggtttctccactatgaagccatcatttcccttttatagttagtaaaaatttgaagggagataccaatatgccaatatcagccaggtgcggtggcttaagcctgtaatcctaatactttgagagactgaggggggcagactgcttgagcccaggagttggagaccctcctgggcaacatagggagacccccatctctacaaaacaaactatatgtatacatacacacacacgtatatatacatatacacgtatagatgtatatacacatatatatacgtatagatgtatatacacatatatacgtatagatgtatatacacatatatatacgtatagatgtatatacacatatatacgtatagatgtatatacacatatatatacgtatagatgtatatacacatatatatacgtatagatgtatatacacatatatatacgtatagatgtatatacacacatatatatacttgtacatatatagtttgttttgtagagatacgtatacacacacacacattttatatacacacacacacacacacacacacacacacacacacacacacacacacacacatatatatatatgccaggcatggtggcacacatctgtggtcccagttactcatgaggcggagacaggatgatcacttgaggctgggaggtcagggctacagtgagttgtgattgtgccactgcactccagcctgggcagtgaagccagaccctgtctcaaaaaaaaaaaaaatgcaaatatcctgtttctccttaaattttctcatagtaatcttagttctcattggtggatcttgcctacagcaattattactgtggtattctagtgagggctttccatttcctcccttccttctacatttattaattgaaatttatctataagcaagatctgtttcatctcttccatttaagaaaactattcaattatttatttgtagcaatatgactgtacagagtctttattcgatggatcataatccactactatcattatttattttgttgctccaattgttccagctttggccattgggagctccttcaggatggctcccttgttcttttgataggtcaaaagatgcgttttgatatgttcttttgacatggccttttggaaagatgtacttaccttctggcatcccaagtatttctggctcatcttgtattttcactccctagtccttgaatcaactacttccccaagaggttctggtcccttttgctgaggaatggtgtttaggaacaaaggtccgggctccagaggcgctcactgttactggggtatcactgttccatgaaatatacgtacacatactgtgacagttgcagataccaggatgaaatcaccttgtttgtcagacccaaacaaactgaagccaggaaagcacaaaaagagagagctcctggatgtgtgtctgagataaggactgtctcaagggctttctaaaataaccctacaagagatcccctctttaggactgcagtaattcagataagatgctctcaaaagaacagttgcccagtaacagcatctccaccaatgaactgacacaaactctggctttgagctcccagaaccaatgaactctgtttccaagtagcttatgtgaacttctcctttctgccaataaaagcttccccttaccctctcctctgcaggtgcatctgtggcttgccatagctgtgcatcccagattataatcttttttgcttattccccaataaattcattatattattaggttgacaatactaaaccacacatacaaaaatagctatatttaggctggctgcggcagctcacgcttgtaatcccagcactttgggaggccaaggcaggtggatcatctgaggtcaggagttcgagaccagcctggccaaaacagtgaaactcaatctctactaaaaatacaaaaattagctaggcatggtggtggatgcctgtaatctcagctactcaggaggctgaggcaggagaatcgtttgaacccaggaggtggcggttgcagtaagcagagatcgtgccactgcactccagcctgggcagcaagagcaaaactgtctaaaaaaaaaaatagctatatttgtttctatagctatttacttcataagtaaatcataagacaaatactgaacaatatcacctatatgcagaatcttaaaaagctgcattaatagaaatagagagtggaatggtagttgccaagggctgggaagtgagggaaatagggaggtattggtgaaagggtaaaatttttcagtaataagatgaatcagctctgggaatctaatacacagaatcgtgactatagtagacaatactgtattgtaaacttgaaatctgttaagagaatagatcttaaatgttctcatcatacacatacacacacaaacacacacacacacagatggtaactatgtgagttgatggatatgctaacaaatttgactgtggtaatcatttcactataaatatgtatataaactcaaaacaaaacaaaatcatgttttcaggctgggcgcatggctcatgcctataatctcagcactctgggaggctgaggtgggtggatcacttcaggccaggagttcgagaccaacctggccaacacagtgaaaccttgactctactaaaaatacaaaaattggccaggcttggtggcgtgcacctctagtcccagctatttgggaggttgaggcatgaaagtagcttgaacccaggaggtggatgttacagtgagctgagatcatgccactgccctccagcctgggtgacagagtgaaactctgtctcaaaaataaaaacataaaaaacaaaatcatgatttcatggataactctcattctcgaccagcaccataagattcatcttaacctaaaaagacagtgaactgtggccgttgggccaaatatggcctacctcctgtttgttttgtttttgtctgttttttaatttgttttttgggatagggtcttgctttgtcatccacgctggagtacaatgacactatcatggctcactgctgcctcaaactcctgggctccagtgatcttcttactcagcctccagagtagctgggaccactgaaatatgccaccatgctcagctaattttttttattttttggtagagacaaggtctcactatgccgctcaggctgatctccataaactgaactctggggctcaaatgattctctcacctcagcctccccaagggctgggattacaggtgtgagccaccacgcctaaccctgcttcaataaagttttatttaacacactcatacctatttgtttacatattatctgtggccgtttttgttcaaaggcacagttgaatagttgagaaaaagactttatggcccacaaagctgaagatacccggcccttaaaagaaacagtttatgggcccctgttctaggattccttctttctctctttttgttgttgttgttgtggtttttgagacagagtcttgtcttactctgtcacccaggctggagagcaatggcatgatctcagctcactgcaacctccagctcctgggttccagcagttctgcctcagcctcctgagtagctgggattacaggtgtgtgccaccacacctggctagtttttgtatttttagtagagacggggtttcaccatgttggccaggctggtctccaactcctgacctagtgatctgcccacctcggcctcccaaagtgctgggattacaagtgtgagccaccgtgcccggcctctttctctatttgtatcttcttttgccaacactgaggatgagattcttgtatctacaatgtatcttatttatttaatcatagtttgcacatcaggtggtaatagaattcctgtgagaaaaagatttaccatccagagaacaatgtttgcacagttttttttttctttttgcctttagccttgtagtatctgttcaaaagactgttttccaaagagattggtgtggttatgtaattcatttgtaatacaacttagtttcatttgttactgcttgtattccatttgggctcccccatattttggtttaattatttattgatttggggcaatgtgaaacacttctgtaagaaacagtcggagttattcaagaagggaaacttggccgggcacagtggctcacacctgtaatccagcactttgggaggctgaggtgggcggatcacttgaggtcaggaaggagttcaagatgagcctggccaacatagtaaaatactgtctctactaaaaatacaaaaattagccaggcgtggtagcatgggcctgtaatcccagctacttgggaggctgaggcaggagaattgcttgaacctgggagaaggaggctgcagtgagctgagatcgtgccactgcaatccagcctgggcaatgaagtgagactctgtctttaaaaaaaataaataaataaaggtagacttgtatagacaactgtcacttcctcctcacccttgttccccacccctactccctccttccctcccttgccacataccctctctaggtaatctgtcttctttggtcctgttttatccttccaagtatcttctgcacaagtaagtggatatatgtgtattttcttatatctccttcctttttacatcagtgacagtatactacagatactcatttgtatttagcttttttcatttaacagtatatcctgaaaactcctctaaatgagttcacagagatcttcccactctttttgatggctatatactaatccatggtgtggctacactatagcttactcatccactctcccacatatgggcatttaggttgcctccaatattttgcaattacaatgttgtaatggattaccttgtgtgtctacgtagtttcatattcttggaggtgtatctttagggtagattcttaggagtgggtttcctggatcaaaaaggaaatgcgtatgtacttttattagatattgccaaatttctctccagaagggttgtaccaatttgcatgcccaccagcaaggtatgagagagccatttctccatatcctcatcacagagtataatttcacagttttacattttccccactgataggtcagaaatggtgtcctagtgttgttacaactagcatgtttataatgaggaggtgagtttcagcgtttttctcatctgcttgaggatgatttttaaaacgtgttttggtgaattatctggtcacatctttcccccaatttttctatcaaaatgtccttattcttaaaagatgccactgaaatatacatagatgagaaggatcctgaagtgtcaagtcgttcattggaaaaaaaagtgtgtgtgcgtatgtgtgtgtgtgtgtgtgagacacagagacagaaagagagagagaaagtttatccatctatctgagagaacaactgccccccgcttccatacacaaagagctagttgtcaacaggctactatgttcccttccatagcgctatggtctaatgtgtgtgtgcccccaaatttcatattgtgaaacctaatcacgattgtgatggtattaggagctggggcctttgggaggtcactaggtcatgagggatccaccttcatggatgagatcagtgcctgtataaaagaaaccccagtgagctagctagttcttccactatgtgaggctacacagcagggaaacaccatctacgaaccagcaagtgggtcctcacgggcactgaatctgctgggaccttgttcttggacttcccagtctccagaactgtcagaaataaatttctgttgtgtgtaatctacacagtttacggcattttgttttggtagcccaaatggactaagacatgtagcaacagtcaacataatctcccaacctccccttcctttgccttcgtggcttctctatgacaagacactcttggaagaccttagctgccaacaggctgagcacagccctgggagtcccagcaaactggctgagaacttgggtctctagtcgttgctctgtgagtgctgccagtgtgtgatgcccggcgccagatgtcccaattgtgtgtgtaagatggtgtttcactcttgttgcccaggctggagtgcaatggcgcaatctcggctcaccgcaacctccgcctcctgggttcaagtgattctcctgcgtcagcctcctagctaggattacaagcacgtaccaccatgcctggctaattttgtatttttagtagagatggggtttcaccatgttggtcaggctggtctcaaactcctaagctcaggtaatccacctgccttggcctcccaaagtgctgggatgacaggtgtgagccactgtgcccggcccagatatcccaatttacttgaggatcctgcccagccaaagtcctaaaggtgggttacaagcccttgtcactctccttcaactcacaatgtttcacacacacacacacacacacacacacacacacttgctgtattaaagcaactctctttttttcaaataaaatggtaatatggctataaagaaacacctgccttatttgcctgaaacaggaaataattataaaagtaaacatgtcgaaagcaaaatagaaatagagggctggcatggatgtgatggaaacctagacactgcgggatgtccagggagggaccccagcccctgataccttctgaagtaaaaatcccagaagggtgccttcaacagaaatcttagataatttttttgaaggcagatggagagagggtggttccaagagcaaatgggatctgtaacctcgatgatcacaacatttcaatatggtacctgggaagtagatgaaattagcacatcgaaagagctggtacacactagatgctcaataaatgctactgctagacttcttatcgtcatcacaatcagcagcagcatgcagaaagagtaaacatagcaggtgtgagactgctgtccttagaaatgtctgcttacaaagttggcccttaggcagttcctgggaacttgaatggtaaacagttccctacacagatataaaaattccctaaataagaagagagccttgctgtacctaaacagtttgtgcaactaatattgcttacgtcaaatgctcgcttcacttatggaagtctagacttttggtatacgttaggcagagggtgcctatgtgaccagtaccctcaataaaatctcgggcactggttctcgaatgagcttctctggtcgacagtattgtgcgtgtgccgtcccacctcactgttggaggagtgaagcccatctggtgtaactcccctggaagaagattcttagaaacttgtgctggtggtttccggacttttccctgggtaccttttttctttgctgcttttgctttgtagcttctcactagaatacatctcagctgtgactatgtgctgagtcttgtgagtccttgtaaaatcaccaaacctgggtgccttgggtagccactgcacaagcagcagccgcagtggctgagggtggtgtcaggtggctggacctaagggaagcctctctcagaacccatcacatcctagcactgtggatggaaggcagccagcattcctgaccctagtggggtgggagttgcagggctggggttggaagaggctaagtacataaaatccagggccaaagatgacagtgggaacacagggaccagcaaaagaggcacacaggaggccatggccaacaccagctgggccctgctacatcacagcagatgctgcaaggagaaaggccaacatctggtcagatgccactcctttcgggtcaggagatgggacattctgagaacccagatctcctttaggaaaaaagagaagagggtgggagaatctcaaattgaatgcatctgtaacctgaactgagcaaatttaaagccggaagtgacgcggccatctttaaatggcatgtttttaacatcagggcaaatgagggtttgtgagtgaggttcaccaagagcagtggttctcaaacccgagtgtgcatccgaatcacctggagggtttgttaaagcacagaccgtgggcccctccccggcaggcatagtatccaggaacacttggggtattgggaaaatgaagctagaaagactccctcaattttggtcctcctccctagagaattactagaacacagcagagtagagggccaggaattgcaagtagagggcaggataaagaaaatgtggtacatttacacaatgcgggagggagagaaggctaccgacggcctttcccctgatactcaaggtcgtcttggaaacaacgtcaccacctacaagcccatccagtgctcccgtgttctcctcttagtttgaataccaagcttaacctggcaggagcgccctttcccttgaggatctcggaagacagtcaaatgcattcatcaactaatatcccacaaacagaagcagagggtccatgtttcaatggcattttgggcatacaaaaaatttataactttcctgagctcacagcaaagcttcccataaagggctgccataaatggcagtttggatgcccgttccgctcacaaaagcccatttaactcaagtgtgcatagtttataagtatttaagtgccttgtgggttatgtaaagcttgtgggggagttcaggaactgaatcaccatttacaacgtgttttttttcccccactgtgggaaaataccttccctgtgaacagcgagaaggagggtactaaagaaatgtgtaagagatggaaatgtggaggctggagggatgttctccttgctttgaaactccaagaacatggccaggcacggtggctcacatctgtaatcctagcactttgggaggccgaggcgggcagatcacaaggtcaggagtttaagactagcctggccaacatggtgaaactccgtctctactaaaaatacaaaaattagcccggcatggtggcgtgcgcctgtaatcccagctactcgggaggctgaggcaggagaattgcttgaacccaggaggcaaaggttgtagtgagccgagattgcgccactgcactccagcctggacgagaaaaaaaaaagagagaaactccaagagcatgcctcatgctcttggggtagcaatcatgaagcagtttagggattcatcgattcacaaataatttctgagctcctaatctctcagagacgacatccagggtgcaacaaagaatagtgcttgaggctgttcacaagagccaagacagggagtcaacctgtgttcatcaagagaaaaatggataaagaaaatgtggtacatttacacaatggaatactattcagccataaaaagaatgagatcgtgtcatctgcagcaacacggatggaactggaggccattatgttaagtgaaataggccaggcacagaaagacaatggttgcacattctcactcataggtgggagctacaaaagttgatctcatgctggtagagtagaatggtggctaccagaggctggggagggaagagaggagaagagtgatcaagaggtgggttaaggggtacagtaagaatacagtaagatggaaggatcacattctagtatttgacagtatagtagggaaattatagttaacagtaatttattgtatgcttcaaaataggtagaagagaagaattgtaatgttcccagtacaaagaaaagataaacgtttgctgtgatgggtatctcagttaatctgatttgatcattacacagtgtctacaggtatgctaaaaatatagacaacaattacctatcaattaaaaataaaataaaagaatagtgcttgaatccctgtcctctggctgctcagagtctgagatgcgcagacacagagaaaggcactaaccccccagggaacctgttctgcaggaggaaggcagcagctattggaacttgaatagagacagccgcgcccacctcgggcttcttcaagggctcctggaggaagctggccaggtaaggagttgaagacccactggaggcaaaggggccaacgtgtgtagagacatgttgcaggaggtattgatcttgattgggctgggtggcaggtggaggatggcctggtgggaggtgggcttagaggacacgttaaggatttgttaaagaattgtggtaaaattggctgggcacggtggctcacgcctgtaatcccagcactttgggaggccaaggtgggcggatcacgaggccaagagatcgagaccatcctggccaacatggtgaaaccctgtctctaccaaaaatacaaaaattagctgggcgtggtggcgcatgcctgtagtcccagctacttgggaggctgaggcaggaaaatcacatgaacctgggaggcagaggttgcagtgagccaagatcgagctactgcactccagcctgggcgacagagtgagactctgtctcaaaaaaaaaaaaaaaaaaaaaaaaaaaaagaattgtggtaaaattaatataacatagaactcagcattttaaccatttatgaggtgtacatttcagtggtatttagtgtatattcacagtgttgtgcaaccatcaccacaatctagttccagaacatttttatcacccaaaagcaaatgctatacccattagcagtcactccccacccctaccgccctcagctcctggcaactatgactctgcttctgtctctatggatctgcccactcaggacagcacatgaatatgatacggtttggctgtgtctccacccaaatctcatcttgaattgtagctcccataattcccatatgtcacggaagggacctggtgggaagtaattgaatcatgggggtaggtctttcccatgctgttctcatgatagtgaataagtctcatgagatctgatggttttataaagggcagtttccccacacacactctcttgctgctgccatgtaagacatgattttgctcctcatttgccttccgccatgattgtgaggcctccccagccatgtggaactgtgagtccattaaacctctttcttctataaattacccaatgtcaggtatgtctgtattagtagtgtgaggatagactaatacaataaataaaactacacgcatgtggccttttgtgttggctttttccacttagcaaaatgtttcaaggttcatccatattgaatcatgtatttgtatcagtacttctttccttttacagctgaacaatattccattgtatgggtatgtctcattttgcttatccattcatccactgatggacatttgggttgtttctaccttctggctattgtaaataatgctgctgtgaacagtggtgtacacgttttcggtttctttgtttgtttttttgagatggagtcccactctgttgcccaggctggattgcagtagcacaatcttggctcattgttaaccttcatctcccgggttcaagtgattttcctgactcagcctcatgagtagctgggattacaggcacacaacaccatgcccaggtaatttttttgggtttcaccatgttgaccaggctggtcttgaactcccgacctcaggtgacccgcccacctcggcctcccaaagtgctgggattacaggtgtgagccacagcacccggtctacatgtttttgtttgaatgcctgttttcagtgatgttgggcctactctgaggagtggaattgctgagtcacaggctaaggatttcatgcttaggagcatcataggagcagctagaggccatgtaagtgaggagctgcatgattagaactgtgtttctaagcattggctatagctgctgtgggtggaaagttggagggaagcaggagtggccagaggtgacaatagtccaggagagagaccagtggaggctggtggcagggggaaggagagaagtcacgaattgcattctcctcatctcttttgctcctgctcttctccctatcacagccgcagacatctagccacaagcgagaaataaccattttccctgcagacattttcacattctgaaacaacgaggggttgaacaacaacccttgagcaacacaggtttgaactgtgcaggtccacttacatgtggattttcttctgtctctgccaccccagagacagccagaccaatacctcctcttcctcctcctccacagcgaactcagtgtgaagatgatccacttccacttaatgaatagtaaatatattttctcttccttaggattttcttaataatattttcttttttctcatttactttattgtaagaatacagtatataacaggggtccccagcccctcggccacagacctgacctggtccatggtttgttaggaactgggcctgcacagcaggagatgggcggcaggcaagcgaacgaagcttcatctgtattgacagccactccccatcactcacattaccacctgagctccgcctcccatcagatcagcggcagcattagactctcagaggagcacgaaccctatcgtgaaccgcacatgcaagggacctacgttgtgatgatcggtcactgtcccccatcacccctagatgggacggtctagttgcaggaaaacaagctcctctacattatggggaattgtataattatttcattacatattacaatgtgattgtaataaaaataaagtgcacaataaatgtcatgtgcttgaatcatcccgaaaccatccctccccccaccccagtccatggaaaaattgtcttccatgaaaccggtccctggtaccaaaaaggttggagactgctggtatataatacatataaaaaatatgtgttgatcgactgtttatgctattggtaaggcttctggtcaacggtaggctatcagcagttaattttttggggagtccaaagttatacgtgtaattgactaaatggaactgactgtgtggggagggggccggtgcccccaagccccacattatccaagggtcaatgtagtgagctggtaagcacagctgattgtgggcaagacaggtggttttgaacttcttcccagctggactatgagaaactcactgacccccacaaaaaaaacttttcatggtctcttttagctccaagcctccatgatttctgtgggaggctgtcctgtaaccatcagctcttcacctccaatcatgaagtggtttccactgtaaaggaagctgctgattcacgtggagactctactatcttcttatcagtcctttatttatataactgtctgacttatgagtcaatctttaggacaggataaaagttcacatcttctcccatctgaataatctaagacctagaacattatcttgaggcacccattttgtcaacaaacaaacaaaaaacaaaaatgccagcaaaccaaagaaaaatggaaactgtccacttgcacctcttttgagtcctcctgcaaactggcatctacaagaggaactgtcactcacagcacctttactgtcatgtggcaaggtatcagtggcttctgaaggtgctgcttcatgcagaatgttttgggtgccccctacattctaatttactacaggtaactgttggtaaaaggcccactcagactttcccatgtagctggttctcaatagatcctctatggaaggaaagaaggaaggatgaaccgaaaaatggataaagtatacacccccatggaagaaggaagaaatagatccaatgtcatgatttgcattggttttgctgccccatttccttgagactaatttttttttttttttttttggatacacggtctcgccatctcctataggctagagtgcagtggcacagtcacggctcactgcagcctcaacctctcgtgctcaagggatcctcccacctcagcccctagggtagctgggactacatgcacacaccaccacacctggctaatttttaaattttttgtagagccaggggtctcactatattgcccaggctggtctcggactcctaggctcaagtgatcctcccgcctctgcttcccaaagtgctggtgtgagccactgcgcctggcctgaggctgattctggcagtagtgaggtcaacaggggattacacacccaatacttgtgccataaaagctccaaccaagagtcaaagggttgatctcgtagaaaactctttagctaaagacagagccaaaaaaccaaagtgcagctcaaagtcagatgtgctcttagacaggtcccccgagagagctgggaatcctgggactccatcacttacattttcctagagaagtctaagcccctgggttcctttggcagtctggcagcttggggctcttcccaggctgtttttgaaaggggggaatcaccctgcctgacccttttccaacactacccatctgactcctgctagtggaggggctctttaagtcccaggggaagggctattcaagtgcttagaagattttgcaatcaaactttcaagggtaaatatttgcagtgactcaccagagaggtttttctgctctccttctggcccctggggagccacagggctctttccccaggtctgttagcagtttacgatgattatccgtaggctccctggacagctcatgagtcaagagactgggttcccgtaacccactcccttgcccggaggcacctgggctcaccataccagaggtcagcagcacatttacagcaccatagcctagtaaagtcaatggtacaagtgtccagcttgtggcctggaggctttgcccaggctcgtgggacaggcagacaatttacaaggtaagtaacacatcataaaattgagcagcaaacactaatgagcctacaagccaggacagaggacctttctctccgaccagggaaactgacacagccactgtcccaggtttgggcaggcgtgccctgctagcaccgaccacagtgaccaaggataacgcatcgtgctttcctctagaccccaagaagcaactgtaaaccttgggaggctttcaagagactccccagatcaagggaccttaacactgtccccaaactctatttggcagctggtttatcgcggccaccactatcatccacccccatgattatgactttggtgagtctctctcctgcttcaaatcacagatgtggtccctgactgaggctcactctgtttgcagaaggggactacggtgtcatcagagagctggggagtggaggggtgagcttcctcagagtgtagctacaagagaaagcatttggctctgcatttgttggtgctctgtgtgggtgcccaatggcttgaagttgtcagcatatctgggcacacaagtttgtctcaggccccccgggggttctgatgacacgttaagctcataggccatgtggcaatcatcctgcagaacttttggttccgtctgatcccagctgaaccaattcagaatgggccagacacaagatacaaatggtgctgagcagggaaatgatcatcgattcaactccactgagtagatgttcgtccatttagttggtaacaatttattaagcattcctacatgccaaggcccaaattgggtgccggggacacaggggtgaatgagacagggccaggctcttaggaagtttgggagcagacaggtggtatgcaaacagatacccccacgctggacactctgctccgatgctacgaaggaggccacctttgggagctgatggagaatttcaggggaggacctcgtttaggaagggtgtttagaggcggactctttgaaaaggtgcaactgcaactgaaattgagatctgaagaattaaagggggaggggcggttgagggcaaaataactttctgtgcagaggaaagaacaagaacgaggcccagcgatgggcaggatctttgtgtgttcaagaaacttgaagtcctgtgtatctggagtctagtaagtgatggggagagtgaacttgaattttacttcaaacacaataagccccaaaaggattcatctcaggaacgtggcaaaggtcagttttcatctgacctgggtttttaccaggtccccctcatactttttctttggctttccatgcaacacacagatgcaacatggtcatctaggattagggaatgatttaggaatacagggacattttctgattttgaaacagcccaatttccaacctctgcatcagatctatccacaggtgggctgtgcgtggtggttcatgcctgtaatcccagcactttgggaggccgaggtgggaggatcacttgaggtcaggagttcaagaccagcctgggcaacatgaaaccctgtctctaccaaaaatacaaaaattagccaggcgtggtggtatacgcctataatcccagctactcaggaggctgaggcaggagaattgcttgaacccaggagatgaagattgcagtgagctatgatcccaccactgcactccagcttaggtgactgagactctgtcttaaaaaaaaaaaaaatctattgacaggtggacctcttgacccttgacctccatctgcaggcttggtcttgtccctaggaccaatctggacttatcacaaggtacacttaggggttttcctcaacccataatgtgacactcaacatctgttctttgttgttctgcaaacagtatctctatctgcctttttcctgggcttggacgagtccctgtcccccaggtctgttgctggcatgcttccagccagatgctgtgctttcctaggattggagcctcatccctgcttctgagccatcgtccagtgtcaggagtcttgctatgtggcgacagaccttccagaagctgactggggtctgcctgcactttcaaacagtgcctgattcgggatcccactgctgtcccgctccacccgtctccttacccagcatggctcttggctcgttcgtgatagtaaagacaggtgcaccacaccctgcctgggcccttccctccagacccccctctgcttggcaggtggagctccctctcaacatctaaaactgttcttctgtccagtgagggggctgagtctcagggccaggcctctgcccgtctcttccccaacctgctgctgtgaatgcccagctatggcccaacgacatgctagcctcagcgtgtgctccacaggcaggaatcagggcatatgttcaagtttataaggggcctatgaaaaaagagactgccagcagattccctattaaatgggcttcccttgcagtaaaagatttaaattagagtatcttctaaacaggggcgtaatgggaccaccacaggtcatttaatccatccctctgccacttgccattaaaggaagagcatgcttgtgtcacctgctagtcatcacctagacatgctaaagaaatatacagactcccaagaggcttccgaatagctattttccaaattaatcaggaggggaattcttttcttcaaataaagtccttttttttaagtgttttaattttgttgctgttgttgagacagggtcatgctctgtcacccaggctggagtttggtggcacaatcacagctactataacctcaaactcctaggctcaagccatcttcccacttcagtctcccaagtagctgggactacaggcgtatgccatcatgcctggttagtttttttaaaaaatttttgtagacacagggtctcactacgttgcccaggctggcaaactcttgggtaggagcattttttttttagacagtctcgctctgttgcccaggctggagtgcgatggtgcgatctcggctcactgcaacctccgccttccggctcctgcctcagcctcacgagtagctgggactacaggcgcgtgccaacacgcccagctaattttttgtatttttagtagagatggggtttcaccatgttagccaggatggtctcgatctcctgacctcttgatccacctgcctcgacatcccaaagtgctgggattacaggcgtgagccaccgcgcctggccaggagcataatattgaaaacagatgagagcaaagctttgctcctcacacccaccataaactgtagaactctgtgggaggctgtttgaaaaccattgctgaaaatacagagatcctaagatgtggggcaaatagactcctgtgaggaggaggcatggagtagggaaggtccatcatgctaatagtgttgaagctgacaaaatcctggcagcagccgcctttgaccaacaagcatatgccaagacccggctggatgctctataggttctattgttgaacctgcaaaatctttgccaagtaggcataattattccaatttttcacatgcagaaactgaggctctgtggcatacagtgacatctccaaggccacacacctcctggagagccataatttgaacctcggagtgccccactgacagccaacgacaccagagggtccctttgtatgtaaggattgcatgactccagttgaatgacccaagccggggacaaacaggaaagaacccagcagctctggaggccacttgagctgactgtcaaatgctctgggctgattaacgactacgaacttcagggaagacaagtgtgctttgatgccacagagctatcctgggcctgtacaggcccgtttctgctctgaatgaggaagctgtactttgcaggcacccggcagaacaagaatagggcctaagatacctgaatgaagggcacagaggaagtacaaaatacagtcattgttggagctagaagctggtgccaggctacgagggggcccagtggccaagcattatggcaggagagagatgtgaatattttccaggcaaataatgcagcttctctacctggaaaccctgcagccgtgtcatgctggacaaccccctcagtccaggcgaggccaactggcgactgccaggccataccatgtgtgccttcagctgccctccactggggacaaatgcctcctctgagcgatcctcttcaggaagtggaggatgcagtggctgctccccatgtgtcccccatggctccccaagtttaacaggacttcaggtggcaatgggagatccttagggcatgagcagttcacatatacttttcacagtagtttccagtcgtcaaattacttcacatagggtaagggatagttccaggcaaacttaatgtagcagcaggacctcaggggaaagggttcgcttcagtgggcatcaactggtctgtgcaaatccctggaaccaaattgctgtctctgatgtagaggggtccaagaagaggtgagaaaggtcaggttccccctggtgggtagactctggggactccagaaatatggctgcagctactctagctctgactttgttcaacaggtgcaaataccaaggtgatttgtgacatctgtctattcacaccccgcaggctctgggtacctctactccccaagacaactggtgttctgtttccccccacactgcccagggcccctcttggagcaggtacctgaggtgggccagccagtcatccctgtcctgtctcctgtgccatggacccctcccgagccccttgccaatcaaaaatccggtaaatatttggtgtcctctgcacagtgacagccttgtaggtggctggcccgatgctcgactgtactcagtttcatgctagagcgttaataagtggttctaaatgcagtcgagaagataaaatctcacctccgctcactctcccaagatagggaggaggatttgccttttctaagaaattaaccagccccttgaaagtaattgtttgaaagcgttcagctgggtctatgtgcagctatagaggtcatggaaggcccgatggggcagttttgaaaagtggggagaagagacacagaattaccatataagtcagcaattccactcctgggtatacaccatacagaaatggaaacagagacttaaatacacacttgcacacacctgttcatgtcagcattattcacaatcgccaaaaggtagaaacaacccaattgtccatgagcctatggagggtcaacacaacgtggtgggcatgtaggagaatattattcagccgagaaagtgaatgaagtgctgatctatgccacaatgcagatgaacctcaaaaacatccatgctaagtgaaagcagccagacacgaacggtcacatattgtacgattccactgacatgacatgccccaaacaggcaaatccatagcaacggtagatggatttgtggttgccaaaggctgtggggggagggagaagacagggtggctgcttatgggtatggacttttcttttggggtgatgaaaacattttggaagatagaggtggcagttgtacaacattgacagtactaaatgccaataaatggttcacttccaagtggctaattttacattatgaaaatttccaaagtgggggatgttcaaagaaagcctcctctccaccgagcgctgtgtgaggggatcatacactccactgggagggggccttgcaagctgcagggaagccaggaaatactctccttcctccttctggggagcgtgtgtgatccaggagtgacgcgctggggcaagcgaggcccatctgtacccaggctggtggcggggctcaagagcccaggtgagactgtcccatgggatgggggtaccaaagctgccacagcaggacttcctgaaactttgaaggcatgtgcctgtgttggtgttgggatctgacagctgggaagaggggatgaaaccaaacctcctcccagggggacgtcctggtgaggtttcctaaaaacaagttaggagtcagaggatacacgtcggagaattccccaaggggctcctggctctcagaagaagggagaatattgaagtgctgggggtactcacacggggtttggaggattagcttctcgggtacttttcccttgggatatgaaaagggaaactgaaacagataaacacgtacttgtacacacatgtgcatggcagcattattcacatcaccaaaaggtggaaaccacccaaatgtccatcagcttatgaatggatcgacacaatgagatggacatgtaagagagtattttgtgaacagttctataacctccttccttcttgtgttataatgcccttttggttcccccaaatccttcagtgacatcggagacaccagatgcaccctgtggtggtgggatggaaggaaagagaggtggtggagtctcagggaagggaggcccactctatagactccactccaccctctctcataagaccatcaagcacttgtgaaggtcacagcagggctcctggtgtgcccgagaccaacaagaccaggtccagtgcagggctgggaggggagaggagaacacagctccaaggaatggcagtcacctggaaacgtctagagtagataaaccagaccagatttcccaaatctgtacaagggaggaagtggccacactggggaggggaaagtctcagaagggccacaccattttataggaggactctcaaaggcttagctcaaaggaatgattccatacatggagtctgcacaggtgagggcagactaggggtgggggacctcctgggagctttctccaaacacagatgctgactctggaggtgaggcctactgaacaaccccgagggtgattcagaagtgcaatcctcacagatgaccatgtgcagggagaagggacttggagtaatcttgagctcaatcctggctcaggcatttcctagaggtgactttgggcaagttattctttcccccaaattctctgcacctgtttctttccgtgtcaagtgtagacccggccttacccttggtccagcccctctgagatctatttcatgtatataaaaaaaaaatggttagccagtgtaatcacctgataactaatggtccttccagcagacagattcatctactcacttgacagttacttactgaacacctactttgtgccagaaatgtaagagttgacggtttcgtcctcattcgctgtttccactaacagttcagtggctggatcaaaaggtattttcaatgaaaaacagtacattaaataatttcagctgtttgagatgaattccactaacatggaaattgtgaacctgtggcattttggagaattattcataagtggaaactaaataaaaatacagcttgtgcatgctcttgactcacactggagtcattcccatgcgtagatgactttcatttgggaatgttttctctaaaacattcccagaaccttgcaaacataaagatttctggatcagatctttctctgccagctacgacactgtccaagtttggtcaacagtgccaaataggaggtttagcactatataggatatgtgacctctgtccttgaggaatcaggagacaggaaacgggactcgcctgctgaacctgggagcctgtgcctaaacagggggattataatccctcccccacctacctcaaagtagtggattttttttttttttgaggcggagtctcgctctgtcactcaggctggagtgcagtggcgcgatctcggctcactgcaagctctgcctcctgggttcatgccattcttctgcctcagccttcctgagtagctgggactacaggtgcctgccaccacacctggctaattttttgtatttttagtagagacagggtttcaccacattagccaggatggtctcgatctcctgaccttgcgaaccacccgcctcggcctcccaaagggctcagattacaggcgtgggctaccgcgcccgaccaaaatagcgcatttttattaaactgctcaaatcctacaatgatgaggtgatgcattagtctgttttcatgctgctaataaagacatacctgagactggaaagaaaatgaggtttaattggacttacacttccacatggctggggaggcctcagaatcatggcggaaggcaaaaggcacttcttacatggtggcagcaagagaaaatgaggaagaggtaaaagtggaaatccctgataaacccatcagatctcatgagactaattcactatcacgagaatagcacaggaaagaccagctgctatcattcaattacctccccctggttccctcccacaatttgtgggaattctgggagatacaattcaggctgagatttgaatggggacacagccaaaccctatcagatggggtggggatgagaacagagaggtaaagaaagttgttcatgtgttcacatcaatgtccatgagatacttgtacacacaggacaacttgggactggaaaaaagaaggaggggcagagagcatggagctgaaacctcatggctggatctcagcagcacctcatcaaagcactcactctcatctggacggggctcagacctaaccagggtctgctttcttagacaagacctgtttgccaagaagtgctaatattatacacaatttggatacacccagcactaaaaggatattaaatactatcagcattctaggggttttatcggatgccaaatatcttcttataaaccaaacatctggatcaatttgaaattagagtcccaagacaaaaatagaaggcaaaagggaaaataatgaatctcaaattcaaaggcagcctccaatctaggtcaaaaggctgagccctcatgaagacatgccctttggcccccctcccctgggcccacccaccctcccactgtcctcttgtcccaggaagctgtgtgagaacatgctcctcaggtgcccccacttctacaaagctgcagggaacactgaccagccagcaagctcacggtctgggaaacttcctttcctctctcctccccatctttaatcaaaacagatgttcagactggcagtgctgccctctctttagaatgctttaaacaggcagctgccttgatgccgggtagggctgggccaggagagctcaaaagcctttaaacattattaaaatgttttacttaaaaattagatcaataaactgtccattccttgggcggtcgcacaatagtaagcatcttgctttccaagcgtggcagatctcacgaaagccgctgcacgctcagcagcacagaatccaacagcacctgagacccacagccaaggaaacagcagcccgcagctgccacaatcaacttcctggaggacaaatggccatgccactcctcaatctggagtacaatggcgcaatctcggctcactccaacctctgcctcccagattcaagcgattctcctgcctcagcctcccaagcagctggaattacaggcgcccaccaccacgcctggctaattttttgtgtttttagtagagacggggtttcactatgttggccaggctggtctcgaatttctgacctcgtgatccacccgcctcggcctcccaaagtgccgggaccacaggggtgagccaccgagcccagcccccagctctttatagaaaaagcacccacctccctgccctgactctcccgaggggacagagtcctctccttgctcagtctggggctggactgagggagtcccagaggaagaagaggaggaagatagaggaggttgtgctgggcttcccagcttgcagcatggctggcagacacagtcttggggaagtggagccagcggtgggtgaggcagggtggcccgagccctctctcatgctggctctgctgagcatggggactcctgagaagggggtctcacaaaatccactgtgaggttgccaccgggctgtggaacatgtaaatgaaaaccaaagatggtgcttcattctgagctcatgtgattttcttctttattaaacttcaggaaggagagctagaattggctccttaggatacctccccgagccctggtacccatcgtggcttccttctctggctcctgtttcagagactttggaagaactgtctccttggtctcagacatcacgatacccggatctcagctgctcgccactgtgcagctgtctgcagggcggctctgtggggctcccctccattgccccaaccactgcgggacttgttttgtagcagggctggtttggaaattccttttgggtcacctccagtggttccacggcaagctaaggaatggtggccagaagatgacggacaaaacttgaatacgaaggtggaggaaccttgtgggcagggtggggtggtcccctcagggtccgtctaccacaatccaaaatagcattttccctttgacaaaccctgggccaccagagagaagacctggggctggggtctgctgactgtcatcccaggctactttgccttgcagatgctcctgtcctggctctgtgaactggagatgctggtggcctccatggacatccattacgatatttcctccccgggagagtctctgtctctcactccatctttctggaccgaggccaggcaggtgctgtgggcatggctgcccttagttgagcatagaccttcccttgacccttcttttgtgatctcctccctttaagaagcagctgcccctttctttctgctggtatgcagttccttggttctctttggaaatcaagggaatggggtacacaaaggtcagaaatgccaagaagggtagaaacgggaagtctgttttgagttactctgacctcatctcccagaggcctctgtccctcccttgattgggtctctgcctcagtgtctcctcctcaaacagaaccctctctacccccactcctccctatcatgttctcaggagttttgagccattcctggcttgagtttttcttcccggcacgtagtatccacagcctgacatgtccacatgcatctgctcatccagggaataagctccatgagggaaggagctgcctgggctgcagccagctggattctgtgcctaaaacagggcgctgcaccccctgggtgcttcctggcaagctgttattgctgaatatttctcccatccaagtactaactgggcattatggccatagactgaaaacttctttcctttgggagaaatctcacacagaagagggtgcagagggttgcatggtagtccccaaaagatagccatgtcctagaacctaggaatatgatttatttacaaaaaaaagggtctttgtggatgtaattaacttcaggaggtagagataagatcattctagattatctaggtgggccctgaattcaatgacgagtgtccttagaaaagacaaccagaggagagacccacagaggagaggaggaggaaggctgcgtgaagtgaaggcagagacagagaccggaatgatgcggccaccagccaaaggatgcctgcagccaccaggagctggaaagcagcaaggaagggtcctccttccagagcctgcagagagcacagctatctgctggcaccttgatttccaacttctgtccttgggaagtgtgagagaatcaacttctgctgttctaagccacccagtttgtggtaatttgttaggcagccacaggagactaatgcaggggcaggcaccaccacacctggatgctgggcgtggtgaaacagaccccgctatggggcaaagagtctgcaaggagagacagacaataattaagcgaggaaaaaagtgtatataattacagcttgtgaagatctcggaaggaaacaggtgggattgggagtcatggggcagggggaggggaaggcaggagttggcatttcagttgcggtccaaggtggagatcggaaagcatggcaaagcctgagtccccacctggctccttaccccggcctctgagtctacttgctccttcccctgtcctccaccccacaggagggatgatccttctaagcacaaataatagcagtcgccatttacaaggtacctaccaggacagctgcaagaggggacgtggctaatactaatccccattctaagatcaaagaagccaggctcagggagggtaagtgactcttccatgtttaaaccgagatctgatcccggagtctgttcctgttccgctgggcttaatggactctcctcaccattcccatctcgctcaaaagcgcccaggtgttgtctgctgtctgacatatgagacccacgctcctcagagaagcattcagggccccctatctctctgatttccatataaattttcttccaatctactgccacaccccaccagggaacttccaatgtatccacacagacctactcacctgtttttagcacctttatgaacctgcttttaataattatgttataaagtgtattataaatcatattataaaaaaatacaattgtgacattgttactgcctaccatttttgagccctgctatgtgtcctgctctgtgctagaggcttggcctgtatgatcagcttgcggttacaagcgcctcatgagatacgcttcagcagctgcgttttatagacagaacttaggaccctggcccgagactgctgattatgtgtctgggcccaatgtgttctactacattctgcccacaatgttcttgtttctttctgctaatagccataacaccagacgtttcattttcacggctttgcaaaatacttttacatatttcttattctttttctttttttgagacaggatctcactcgtcccccaggctggagtgcagtggtctgatcacagctcgctgcaacctggaactcgagagatcaggtgatccccccatgtcagcctcctgagtagttgggactacaagtgcacgccaccacttctggctaatttttgtattttttgtagagatggggtttcgccatgttgcccaggctggtctcgaactcctgaactcaagtgatctgcccaccttggcctcccaaagtgctgggattacaggtgtgagccaccaagcccctggcacatatttcattttattgcaaaaactttcctgattatccccagatgaaggtgtctatcttcaatttgctcccagtaagatcagggacagagggtggaggctctggggagaggctctgtctcacccaatctcccacaatctccatcagtgcccatcaccaccacaccatctcaacgaagcccaaaatccaagtgttccaaacaatgagctcgctatgccacagtgcaaatccctgggttgctctgaaaatcagatcaccagtggcagctaagtcctccctctgagaaacactgagtcatatcccctggcagggaccatgacctctgctccattctgtccccctcagagcagaaccccccacccccgccccgaccctcatgatcctaggggctccataaatgctcctatgtctgatttgactgatacactcgccacgtggatgggctcaggaaggatgagataccacacaatactcctgccaatgccccctggctgtaaccccagggctgggcaatttatgaagtagacaggagccacacaagctccgttatcacagtaaaagccttgtccaggaacaatgttgcctttcaaattgttttccgccttggacagtggatttataaactgaactggtggctaggaacagaagcccatctgcaaagactaaacgccttgttctacgcgggcctggtttagtattatcctgataagataaacacagatcatagctggctggaggtggggtacttttctatatgtgtctccacgtctacttttacttatgcacaggctgaaattgggggactgctttgcaagttaaagggagaagaaaaagccattttctggatctctttccagaaaggaagttgaatgtaattataagatgttaggtttgtctctaaatagctcagaactaaactgatgtggttactctccaaaaccgtttattgcattttcagtgtggtaaagttggtttgctattgttgataattgttgaagctggataacacacatacggggtttattatggtattctcctatttttatgtatatttacaagtctccataataaaaaccaaaaaaaaaaaaaaaaaaaaggcagttgggtctgaatatatgctgtagctgtgtgatgagcatatggggttttatgattctagtattctcctttttgggtgtttgcttaaaatgttacatggtttaaaaaagaaaagacaaaaagaaaagtactttggttgaacaacagtgacttaaagccactttccttttatttattcattcagcaaatatttatttgtgccatatattcttctagctactgagaagacagaagtccctgccccagtggaactggcattatccccacggtacaaacattcctccagtgtgaatacctggaggggctttcacagcagtgaaagggtagctctggggtgtggaggttggttctttttttgttttgttttgagagggagtctcgctctgtcgcccaggctggagtgcagtggcgtgatctcggctcactgcaagctctgcttcctgggttcacgccattctcctgcctcagcctcccgagtagctgggactacaggcgcccgccaccacacctagataatttttgtatttttagtagagacggggtttcaccatgttagccaggatggtctcgatctcctgaccttgtgatctgcccgccttggcctcccaaagtgctgggattacaggggtgagccacagcgcctggccggaggttggttctttgggaggggaccgaaatcactctagaccatgggtgtccaatcttttggcttccctgggccacactggaagaaaaagaattgtcttgggccacacataaaatacactaacactaaggcagctgatgagctaaaataaaaaaattttgcaaagaaatctcataatgtcttaacagagtttatgaatttgtgttaggctgcattcaaagccatcctgggctgcatgtgacctgtgggccatgggttgggcaagcttgctgtagactttgctgggaggtaggggcaaagaggagcggccctggcttggcctgggaatctatccagtctgttactcttaagcaccctacagcagctcagatggagggagaggagcttcaggaagcccctgcaatgtgtgctggtctatccattcattcattaataacagctgcctccttgtccctcctctaaggctgaaacatatttctagaaagagtttaatccactccttgccttggggccatgctgtaaacacttgggatagatgcctgcctatcccacatttaaagatctctggggacagagcaaccctgagacagagctggcaagggcggccagggctgtggatttgtcagccagggaccaggggacaaagccttctgtgttgctctgtgctgttaactccaccgcatgtgattcatcttacttggcaggggatgggtagctgaaatcctgaaatcactagctttcgggtttgctacctacatccgcccctctggaggcccttttcagcatctggggtttggtagagacccacaccaaaaaaatcagtccacgaaaaacctcaacacaggagctggcctcctccagagtggtacttctggtacctgacttatggcaagatagatcaggggtttctgcaagaacagaagctcttgggagacgaaggttgaatgtgtaatcttggttgccagtcagcctgccatcgtgcgcctggggcgaagggacatgatgctgctggcttctttggcgggagatgggcaaagtttgggtcagcatctttgttaaaatccgtatttcacatcctgtgcttgttctactgcattctaccaggacaaagaacttgactgcaattttattttttaatagttttccattaacagttggggtggagcggtcattttaaatctcagaatcataaagtcatttctatctaatctttgggcagtaagtacagctgcttctgaatcacatacagtttgaaggaaacctaaaatgccaggaggacatttaactatttttatatacaacagccaacatctggatgtattcagtggtttctgaacatctccaagatacaccgccatgaaaggcggggctggggactgccagggaagggacacaggagtcagaatgcacagccctgcccccagggtccccaggccttaatgaaggagacagaacaagcaatccaaggcaagggcaagaaaggggtaagacagaggtggggctgtgtattagtccgttttcacgctgttcataaagacatacccaagactgggcaatgtacaaaagaaagagatttaatggactcacaattccacgtggatggggaggcctcacagtcatggcagaaggtgaaaggcacatctcacatggcggcagacaagagaagagtgacagccaagcgaaacgggtttccccttataaaaccatcagatctcctgagacttatccactaccatgagaacagcatatgggaaaccacccccatgattcaattatctcccactgggcccctcccacaacataagggaattaggggagctacaattcaagatgagatttgggtgggaacatagccaagccatatcaggctgacacacgtggtacacgtgggccctgcacaacctgcagcctgaagctccaccaagctcagatgggacgacgtgcttgggggccacattcaccttccatcacattccatcccagtggcagagctgggaaactttggaagaactggtctcattttgcagttctcacccagatgtttggcatggttttggcactgccaacaatgccttccaggaggttaaagacctggaatttcgcctgaagagagggaggtgtggaggaagctgatcaagcctcagaagtggggatctatggaggacaaaaactagctccgctctccactgaggagggcacacaaggacgtggtgttgagggaccatctccttgtgtggcgatgctaagcaggaaggctgtggggccagaaagagctctttcaagagatagtgagtgatgcagtttaaagaacagagacctggctaggcatggtagctcatgtctgtaatcccagcactttgggaggccgaagtgggcagatacctgaggtcaggagttcgagaccagcctggccaacatggtgaaaccctgtctctactaaaaatacaaaaattagccaggtgtggtggtgcatgcctgtagtcccagctactggggaggctgaagcacaagaattgcttgaacctgggaggcggaggttgcagggagccgaggttgtaccactgtactccagcctgggagacagagggagattctgtctcaaaaaaaaaaaaaaaaaaagaaaaagagaaagaaagaaagagaaagaaaaggaaggaaggaaggaaaagaaaaaaaaaaagaacatagacacgcagagtgtggtggctcacgcctgtaatctcagcactgtgggaagctgaggtggaaggactgtttgagcccagaagttaagtttgagaccagcctgggtgatataaagagaccccatctctatagaatgtttaaaaattagccagctgtggtggtgcctgcctgtagtcctggctactcaggaggctgaggtgggaagattgcctgagcctgggagatggaggctgcagtgagctgtgatcacaccactgcactccagcctaggtaatggagtgagactctgtctccataaaataaaataaaaaagaacatagacatttctcagggtggacagatcactaaccttggatataccaatccacatgctctcataaactcgcaagctaaccctatcttcctgtgttctactgagtccaaagataggaggctactgtttttttctttaggcagcacctagcacagtggctggcacatagtaggccttcaagtgcttgaagcatgtactacctagggtggtggtctcaaccaggccaatttggacccctagggaacagtgggcaatgtctgcagacatttttggttgtcacaactagggggaaggcatctagtgggaagaggctaatgcacagggcaccccccgcctacaacaaagaattatctaccagatgatcaacagtgccaagttctagagaccgacggtcttccactctaccaaatgagtcatcaaagtacacgacagtgccaagttctagcagtcatatttgcacaaaagcaggaagggtccatgggagagtatgggaattcctcttttccagggaattttaagagtggattccagccaggcatggtggctcacaaatgtaatcccaacactttgggaggctgaggcgggtggatcacttgaggtcaggagttccagaccagcttggccaacacggtgaaactccgtctctactaaaaatacaaaaattagccaggtgtggtggtgcatgcctgtaattccagctactcaggaggctgaggcaggagaatcgcttgaaccctggaggtggaggttgcagtgagccaagatcacgccactgcactccagcctgggtgacagagtgagactccatctcaccaaaaaaaaaaaaaaatggaagaaaggaaaaaaaaaattgattccctctgtctttgtggggttgggagtcagaaagaaagaagacataaatgggctgcctgatctcctaagctcccttaccgccccatcaccagacaccagagctgtcggttggcaggtcttcatctgtctgcctcttcctcccacttgggtttattttataggcttttcctgagatattagggggtttccatcaggagtggatcccttccaaaccacaaggcaatgaaaagtcctgcatgtgggactgatgtgctggtgtgtatgtgctttaggagcgagaaagacagcaacataaaccctgtgcatcaaagccaaatccctctacactcaagttccaacttgcagaaatttttatagccaagtaatgatatgcaaagctgatggccttttaattatagcagttccgtgtggggagaaataggagaactattataataaggagacacagtaagcaaaagaacacctttgaatgggcattttcttgctggggtaaaggtaacatggggggttggggggcgataccccacagggttccaagcatgtcacccacattctttgtcttgacaatatgcccgtgaaacacacagagtaaggtttcctgcccccacttttctgatgatctgtttctccatggccaaactgaagtccagacagattcagtccttaaatccattttggaaaactgttaacatccatggccaaccaagatcaactcagagttttcagaaaccaagaacctgaatgaacataggagatgtttagctatcttctatctcagtgtctctttgggagaggcttagaaattaatttctctgtttgatgatccctaaacagaggaacccacctcaaaataagacaaactgttggccgggggtggtggctcatgcctgtaatcccagcacttcgggaggccgaggtgggtgaatcctttgaagccaggagttcaagaccagcctggccaacatggtgaaaccccatctctactaaaaatacaaaaattagccgggcatggtggcatgcgcctgtagtctcagctacttgggaggctgagccatgagaaccactcgaacctgggaggtggaggttgcagtgagctgcgatcatgccactgtactctagcctggacgacggagtgagactctttccaaaacaacaacaactattatttttaccagagcatacctgctatttgcccaaacactgtatggagcattttagacatatcaacttgctagttcatgtaatcttcttatgggagataaactattatcatccctcactgacagatgaggaaaccaaggtacagagatctcgattcacttgttcaagactatgtagctagtaaatcgcagcacctcgatttggacctaggaagtctgacttcagggtccttgctctaatgtggtgctaggctccctttctggagaacagctccccagttttcccatcatttagattaaagaagtcaaagatgcggctagattcactggtcctaaggaataacagtaaagatgaggatgtatgttgacaaatcccttttatttgatacgcttttcagtgggtcctgcaaggccctgaattttatggtagactctatgcataaagtgatgctgtccctcaaaaaagccaaagcgccatctgtgtgcattttatccacaaaccaatggaatcaaccatgaaggaccaggggtatgaaggtcccctctcataccttagcatgacctggcagttccctggggggtcctcttcccctctcagtccatgtggtttagctggagctccagtccaagctctagggataaactgtgaccctaccctgaacaatgggtgcaactccatctctctagccacagtgattggtccaagagggagtaagtggcccaagttggtctattaggattccaagggagctattgagaggagacggtctattttgtttggacttgaacctgggaggatatagggctggagtcattagcaggaagccatcttaacaccattagaaatgggcaatcatgcctatgctgaagagagcagagctgagggagagaaaaaataagcagagacctgatgatataatttgagcctctggaccaaactgtgcctgaaaccagcatcccagactcttcaggtccatgaaccagtaaattctctttttagtttaggacaatatgaattgtgtttctgtgtcttgcaaatgatataaatgaaaactagaaacatgtcattaaaggagacgcaaaagtacactataatgatacttttatagtgaagacagtggggaaaaggcggttatcaaggtcctgctccctctcccccaacctttatcttaaaggagaatgtaaacttttgtagaacatgaggaatgtggttgaatttatatgttccatattaataagtacagctgattgcaactattatcagtaatttcatagaattggttcctgtgtaagttatttacccagctgcatcaattctctcatccacagccacaatgtacccttgacaccagctggccacttgtaacgatgggatctgggtgacaggctggattaagggtgaatgggttggcccatctcttccatctgaaggtcaacatcaaaggtgtggcaccctagcagacagagggctacctaactcgatggcggaggttggattttggaatcaaccatgaaggaccaagagtatgaaggtccctgctcttacattaatgtgacccagcagttccctgggggaaccctcttcacctctcagtccatgtggttcagctggggctccattctgagctccagggatcagactgtgagcctaccgtcgacaacgggtacaattccatctctttgtagtgaatgtgcgacattcactacagcaaaaatcttttgcctggaccagttacttactttattaatcctggatccagagagtaaagatcaaggaagcacatttcttcctcccaatggttctattctctgtacattttttattccaaggcccccagaaaactttcagctattttctggtccccaggacacgtggctgccagctctctgccatcttgggaagtttaagtgtgagggaccaactggccagatggagcctcaggtgtttgggacctgctggaaccggcaaacagctgcctgccgacaccttgggtttcagatgtggggtgtcatcgtgtttgttttccttctgattgaattattcatgtctcatttgtgcacttccctgaaacaatctcttctagatgcatttagaaacttgagtctctgcggtttgtctggactggtttctatttgagaagaaggggagtttgcttgtctaaagcaaagaaaaatgggttgtacacaagtcacagtatccttgattttctgtctcatatacttctttagttctctccaggaatcaggattcctgatggaatgccttccttccctttggaaactcccagtggagcacaggggcgtgtcttgccaactctgtagtgttcctaaagaattctcaattctcaaagaacactctggcaaagaaagaatgggaaacacattgcaagcttaaagggcagtggcaaaacaaataattactgagcctgttggtaaacagacccaaggagacaagtgaattcagcttgttcactcttgcctgtcagaaagaatttaataccaccctgcttctgtttttcttcccctcatgacccaagttagagcttgcttaatttctgtttacaatgtaagtctcatggggaagaagggggagaggtctggccagagtagggaagaggatctgccttcccagggagtgctccctatggaagagtggttctcatcctgtctgcccaacagctacctgaagagcctgggccccagcccaacacaattcaaacagaatcactgagtaacagggcccaggcatcagtatttgaaagttctccacttgattccaacgtgtagtcaaggtttagaaccactgctctagggccgggctctatccaatatggtagccatgggttatgtgtggccgttgagcacctgaaatatggtgaatccaaattgagatgtgctgtaaatgtaaatatacagtggatttttgagagttagtatgaaaaagagaatgtaaactatctcattagcaattttgctaggccgggcatcatggctcatgtgtgtaatcccagcattttgggaggctgaagcaggaggactgcttgagccctggagttagagaccagcctgggcaacataggaagacccccattgctacaaaaaatgtttctttaagtagctgggtgtaggggtccacacctgtaatcccagctactttggaggctgaagtgagaggatcatatgagcccaggagttggcagttgcagtgagctatgagcatgccactgtactctaccctggatgacagagcaagacagaaagagaccccgaatgacagatgtctcaaaaacaacaaagaaaataagttttgctatattgattacaactgacacaatgtggacctgtcccaagtgagaatatgtatacatgtataggcagggagacactggtggtactgcagggcagacaggaaagcaaataaagatcacttaaggaggagaaatattgaagaactcctgtgtcatcaagcaactatgaacacatcatcatctccacatttacgagttgcacaaagtcccgatcattccctctggcacccctacatccacatgggtacacatccttgttctgttatattaagtcagggttcatcttgtttccaccaaagagaaaacggttaggaaggcaaagcgtacggcatggaataataattgccaagcaaaagccaaagttcagccttgaagcctctttttatccattcttctcaagcatggcaaaaatatcctcaaaggacaaccagtttaaacgataagggttttatcagtaagaggcaagtcaatagaatttaaagataaacacataatcaattctaatttctgcagaacaataactacactataataattttgtaccagacatggtagtcaatctgcttgccaagtccattgtacagaaccagactgctccactccagttccgaggttctcctggactctggacattggccacttgccctgtatcctgcttgagcagccccagcaattctcatgtgtgatggttaattttatgtgtcaacttgactgggccaggaggtgcccagatatttggtcacacattctgggtgtttttgtgagggcttttggatgagataagcattttaattggtacagtaggccagactgccctcctgaatctaagtgggcctcatccaagtaagttgaaggcttgaatagaacaaaaagactgatccaccaccaagtaggaaaaggaaaaatactctccagcagactgcctttgaactagaaccacaccatcaactctcctgggtcttgaatctgccagcccactgtgtgaatttggacttgctggctcccataatcacatgagcaaattcttcgtaacaaatctctttctatatatacacatcctattggttctgtctctccagagaaccttgactggtacatcatgtcattcttgcctacagcctgttacctcatctcctaatatcggggatggtctcagggacccccaagttcaggaagacccatggccacagcattgcttctccattcttctacaatctctctgccctttccaaggagagttcactcagcagttccattcagtctccttgaagatattcttcccaacccatgactgagcatcaagattgacttgttttgagaagctgtagctagctcaatgataagccttggatttgctttcttgccttcctgtgttgttcacttccttttcacttttgcttctgcggcagcacactgctcacaactcataacgcatgaactttgcctttggctctgttttctgagaaacctaggcaaagccttttttcttttctttttttttttttgagacggagtctcgcgctgttgcccaggctggagtgcagtgacgcgatctcggctcactacaagctctgcctcccaggttcatgccattctcctgcctcagcctcctgagcagctgggactacaggcgcctgccaccacacccagctaatttttgttgtattttttagtagagacagggtttcaccatcttagccaggatcgtctcaatcttctgacctcgtgatccatctacctcggcctcccaaagtgctgggattacaggcgtgagccaccgcgcccggccaagcctttttctttttaaactcacttgcctgatgaggaaatagctgagtgcttttttattgtggagacagggtctcattatgttgctcaggctccagtgatcctcccacctcagcctcccaaagtgctgggaatacaagtgcatgtccccatgcctggcttgagctctttcttgataggtgtgctcaccaattggcccaggtgtggacacctgcctcaagagatctgatgtataggctgctctttcacctattgcttgagggtttctccttgaacagagatgagctgagccaaatatcttccttctcacttaattaaaacttgataaagaaaaaggtattcaatggacaatggctgttgggcaaagaaatgatgaaggaagtttgtgtgtgtgcacgtaagtgtatgagagagacagggagagagagagaactttccaggttcaatttcagttcatgaagctgaagattttcttgcccctatttcctgtatcctttcagtgaatgtcccttttcacttctaattgctgatcaacctgaacttaactcttttataagtaacctgcttttcctatctggatggttttgtgatattttatgtatctgcaactcaaaagttttcccaggatatgtcacattgcaattttcttttcattaaattcaactaaaatgtggttgatttcttttgagctgcatcctcagattattttcccctcaggttccagaggttttattttcaattataattttgattgttgctcctgttcaaattgatctggttgctctttgaggaacatgcagaagtctctgggtcatctgttctgccaaccacacctattgcttcccctgtctctcttaatttccctcttcgtcctttgcttacagggagaatatatcatttttctttcatacagccagcatgcttttctacaatgccagtgctgttcttatctcctgccagtgactttctactctggcaccatgatttcagttcccctgtggttctcattttttaaatccacccacctttgttttcaccttgatttgttttctttgaatcacatcctgttattctttcatctctgctttggcttgaatgtgtatgtccctccaaaattcatatgttgaaaccaaagacccagtgcagtagtattaagaggtggggcttttggggaagtgattaagtcatgagggctccaccctcaagcatgagattagtgctcttataaaagaggttgaagggaacacccaagtcttttttgccctcttgccatatgaggacacaacaaggtgccatttgtggagcagagagcaagcccttcaccagacacagaatcttctggtgccttgatcttggactttacagcctctagaactgtgagaaataaatttcaactattcataaattaccctgtctattttgttgtagcagcatgaatgaactaagacaatctccaccttataaatcttataaattgttgattttatttccaagaagccacgtagtgtcttcctagattattttagttgaatgagaatttgatttttcttcctccacctccactactggctttaaaattaggggaaattctgcccagatgttgctgtctttatttttagcattgttgagcaagttttcatcattttaatgtcttcacacagggcttctggcaagatgctattttaaaccaaatggcccaaagtgaagcttctagaatacaattccaatcacatcctccctcccccttttaaagccctttagtgtctctgctttgctcttgcgacagaattgcacaaccttcatacagcatgcaaggcctctgatgatgtgggtcctgcctacctttgcagcctctccctttcctccttccccacctgcctgcctaattcttatgcaatcctcaggactcagcctggttgcctaaggcaggctctgctcattattcccttatccattcctcaataggaaaagaatccctgatccttggctggacacatggttgcatggaataaagacagcctcccttgcagctaggtgagaacatgtaactaagcttctggccaaaaaaatgtgaaggggaaaagacgggtgcaacttccggacaggtccttaaaggggggaagtgtatttcttctttactccctctgcctccatcccactatttgggatgtggaaatgatggccgagtaccactgtggaccaaggggctagagatggtaaagtagaaatctagacacaatctaagtcacagatgaccgtggtgtcatgctacttaactctaggtgagagagaaatcaacttcttatttataccattataaatttggattctgttacaaagagcaaacccatattctaaatactacagaactggcactgtaagtgaagtactgcaagtaacaagacctaaccatggggcaacagcttcctggaagcccttgagtgcaggcggtggggacacaggaacatttaggctgcaaagctggagattcccatcaggttgagcaacaccgtgagtgacatctcccctggctgccccttgatggtcatagctctggggggaatttttctgtaggaaaaattcagaagtgtggcatgtgctcacttttagaaaattctaacgaaagacatgaacagccagaaatggaaaggaacagacttgtgcaagaaaagaacctttctctgtctcctgctttctagattgatggaaaggcccttaatttgagaaaatgcttctgtaccttgaacagaagcagttaaaatgaaggctgcaaagcacagggcttagtgagggattagactgatgccttgtcctacaaggtctgctggcagaggtgggacaaagactgttgcctccccatgcaagcacatttgtttcagaagactcaaagttgttgtcattaagctgagagggagcagatgggctgagccagagacctatagagaaaggactgggtcttcaagaaggaagacagacaggggacaggctccaaagacatgtgacatatgtggacttcttctccctgttttcatctgcctgtggcagggcctgcctgcctatttgagctagcctgccgggggataacacagtcaaccttgctgggcagcgtaaggtatttaccaaacactagaggccagttctcactccatcttgaaagaccaaagaaaaataacaacaaaggtcaaccctccctttattttttttgaaagcttctactgagtttcagttaatagagtttttgttttttaatagaaggtgatctgaaaggcaatatggagagaacacttgcaggatgtcttggatccacctaaaattttggatggccttaccagaaagcagtgtttgtgagttttgatgttagaattttcagtgtgctttgaaaggtgtccagtgctttgccaggcgacatgaggaactttccacgaagcttgaaggtaaccctcccctagaaagctgcggtgcttccttgtttcctcacccacaaagacccttagtcaaaggatacacattcatgtattttactagacaacagagtgaaacattttttaaaaaaatttttaccttgaaaatctatattgtgggtcagagtggagatatgatcagcagcaggccaagggacaggccaaggaatcccggatccacaataggaacagataagacatgacatgagggcatggggagaggtgaagtcagtcggtgtcaggaaggcaggttaagtccagggcaggaaaccaagttcaagaccctgcagatgagggggcaatggaaaagtcagtgccaataaggaaggatggattagcagctcaagattcaagcagacaagacagtcctaagagtccaggtacaggggaaggtaaacaggaagaagcaggttcgagcaggcaagacatggcattgaagcccggggtgataagacttagcccgtggagttcgtggtggagacttctggatccacagaccaggtttgtaacagggtaagaatctcggctgaaagattaggagccacagtcctaaagcctgggtcagaaactgggtaacgaggtgggagccaagcacaggtgagcagcagcatctccctgtttctccatccacaaaggcccttggtcaccttgatagtgggcccgcatcttacaaagcaggagctcctcctgcactcccagccagggtgtagatgggagagtttccagggggaggcagcagccccacaccactgtcctagacaaaccacattacccttaatacagattagtgactgccaggtcaacagagtgaaacccgaagggttctcatacattgcccttaactcagtcatcaaactcttcttcttcctcctcctcctctggatcccaatctctccgaaaggtattaatagccaactagctgtacacataaaaaaaactgggaggggtttctagccattctcaacccctatatctaattggaccccaagtctagctgattttattatacttacaaaatggtaaaaccaaatccttcccctgcaatgttcttccatcacctccctgccatccctcatctgagggtgataataacagctataacttctctcattccagggctgtgctagatgcttttcaagtgcactctcgctgaatcccccaacactttgaccctggagccattcataggcccattatacagattttaaaaaagcaaactgaggcccagagaagtgaaatgacatttcaaagctcacccagctggtaaataataacgtcagggacctcaaatttagatctacagtccaccacaaaggccgtgcatagatattaggtttgccgcaaaattgtgggttttggctgggtgcagtggctcaggccgggcgcggtggctaaagcctgtaatcccagcactttgggaggccgaggcgggtggatgacctgaagtcaggagttcgagaccagcctggccaacatggtgaaacctcgtctctactaaaaatacaaaacttagctgggtgtagtggtgcgcacctgtactcccagctacttgggaggctgaggcgggaggatcgcttgaacctgggaggcggaggttgcagtgagctgagatcacgccactgcactccagcctgggtaacagagtaaggctctttctctctctctcaaaaaaaaaattaataaaaataataataattgcggtttttgccaatgaaatggcaaaaactgcaattacttttgcaccaggctaatactgttcaataatgggtcgccaaaaaaggaaggaagcaggtaagaagcgcagcagccaagttcataaccctgctgctgacagtgtcaacatccacctcctgctgagtgcctgctacgcaaccagtaccacccaagggctttccttccactttcatttaccccttcaggaaatcccatttacagatgaggaacctgatccttaacaaggagaaagagcttgagtttgcacaccgtgtctgtgttgagcctccttggtaaagaccagagaacaccacctttttgtgattatggggctgtccccaaacctgtcaggaaggcggatgacatggtctgcagctgttcacctcctgtggactgccctgtttcagatctgggttcatggagtgtttcacctgcctggctgaagaaggaacgtggccgtacttgtgaagctaatagtgagaggttcatttgtttaaacagcagttggtggaaaagcatggaatcaaggatctttacacgtacatattcaaaaccacttcacctcgcatcttgcatccatgtagccccttcacgctcacaatttttcctctcgtgatgtctattctcactcagggccaactccacgggtgtgcgaccagtgcagcatcccagggtctgcactcaggaggaggtaagggttggctgcatacatctcatgcacccagccacgaaaggggccccgggagcccgcgagaggctctctcctccaggaagtacccctctgcccaagggcacgatgttacaaggcagataagatgcaccatgactaagttcttcaaaaaattaaaaatcaaattaccgaatgatttagcaatgcctcttctggccatataccccaaagaacctcaagtggggtcttgaagagatattcttacattcatgttcacaagcagcactattcacaagagctaaatggtgaaacagcccaagtgttcatggacagacgaatgaacaaacaaaatgatgcatccgtgcaacctaatattgttcagccttcaaaggaagaaaattatgacacgttacaacatgatgacccctgaggacattatgctaagtgaaataggacggacacaaagggacaaatactgtgtgatgccacttctatgaggtccctagaggagtcacattcatagagacagaaagaaaatggcagttgccaggggctggggggagataaggaatggggagttagtgcctaatgattaatgtatacataacataccatgtaccatctttttttatttttgatttttggtggagtctcgctctgtcacccaggctggagtacagtgctgtgatcttggctccctgcagcctccgccacccgggttcaagcgattctcgtgcctcagcctcctgagtagctgggattacaggcatgtgccacctgtaatttttgtattttgagtagagacgtggtttcaccatgttggccaggctggactcgaactcttgacttcaagtgatccgcccgcttcagcctcccaaagtgttgggattacagacgtgagccaccgtgcccggccaaaatgtaccatcttgatcaatttttaagtgcacagacaggtcatggtaagtgtgaaaaaatacctaactcccgccctcgttctcctcgcaccctccctgacccaccccaaaaaggcccaagggagcccccctgcattcccaacctgcaggcatgaggtcatacaagcggggtgttgggcagaggcccctggcagatggcagggtagggcccccagcactccattctggacagaatgaaaacctgacgacctatctgatggaattacacggaagaaaggaaattcgtcttttaagaacaagcgggaggcggatgactgaagtcccaaagaatgctgtggttgaacctttttttttttgttgtttgttttctggcacagtctgtctctatgactgagctgagtaacgtgtttcccgtgacaaaggcccctttcttacgacagtttaatagctccaatacgggggacagccctgactctcccatgggccagcgtctgaaggcggccacagaaaaagggagggaaagccgccgctcttctccaagttggtccagactgaactgagagagtataaggaaaaaaaaaatcggaaactttaacccactcctgaaataaaaaatagaagttaccaaagggatggggaacacacatgcagaggcacagagaagaatatggatgaaaaagtggcctcagagcccggtgtggtggctcacgcctgtaatcccagtactttgggaaatcgaggtgggcggatcacttgaggacaggagtttgagaccaacctggccaacatggtaaaaccccatctctacaaaaaatacaaaaattagctgggcgtggtggcaggtgcctgtaatcccagctactcaggaggctgaggcatgagaattgcttgaactcagggggtggaggttacagtgagccaagacgatgccactgcactccaccctgggaaacagagggagaccctgtctcaaaaaaaaaaaaatatatatatatacacacacacacacacacacacacacacacacatatacacatataaaatatatatacacatatatacatatatacacatataagtatatgtatatatgtatatacttatatgtgtatgtatatatgtatatatgtatatacttatatgtgtatatatatgtatatacatatatataaaaataaaaattttaaaaaatttaaaaagaggaaaaaaaagtggccttggggctttgcgtccaactgtgagaggaagtggagaaagctaagagaggacctcagggacagagaagacgccgatggaggtagggagacccgatgccctggtttcttaacagctgctgtgatgaagtaccacagggatttgttctcacagccctggaggccagaagtccaagatcaagttgtccgcagggctatgctccccctgaaggctctaggggaggatcctccctcggctcttccagcttctggtggccctggcacttggtggcattccccagcttctagacacatgactctagtctctgcctccactaccacaaggccgtcttccctccacgtgtccctgtgtggccacggggcactgtcctctccgcatgtgtcatccctccttgttttataagggtacccagtcatgttggacttaggcccaccctaatccagtacgagctgatcttaactaattacatctgcaaagatcctaccgccaaataaggttacagtcacaggtcctggggattaagacttccatacctttctggggtgcatgacttcagcatcgctccttattctggaacttacaggacaggtcactcttgctctgtagctctccctcggagtgaccctgcacatcggctgtctaggaggtgaggctggagaagtgagtcatgaccgcaaggccaccagatcacctcagtaccacctgtctggagttttcccttctttcccccttcctgcccccggtatctcactgctgggcggcactggcaagggttatggttcttaccaaagtaacactcatctggagcaacactcaaaaccatctttaacagaaatatttgcttccagttaacaccgaatacaaaatctctatctgtccctcactgtggattttttacctaggcttgcatttcgtaatgagccaaatgaggtttgattttaaagaagcatctgggctgagggcagcagctcatgcctgtaatctcagcatttggggaggctgaggcggacggatcttttgaggtcaggagtttgagacctggtgaaaccccgcctctactaaaaagagaaaaaaaaattacctgggcatagtggcaggcgcctgtaatcccagctactcgtgaggctgaggcaggagaatcgcttgaacctgggaggtggaggttgcagtgagctgagatcaggccactgcaccccagcctgggcaacagagcaagactccatctcaggggaaaaaaagtgtctgacaaattggaattactatagtcaatgttcaaaggattcataatgggagattagacattttcacaactgagttgaccccatttcccacacgactttgggggagagttttgaagaccttggggtcacagccaggcacgtcacttaacagcagagtgataattaagagcacaggctctggagctggtcacctgggttcaaatcctagaggagtcaaattcatagggacagaaagtacaatggcagctgcccctcacttgctgtgtgctcttggacacagcctgcttctgtaaaatgggaatgataatttccagctttcttgattgttccatgattgctagaggctggcagaggaagtttattcgtgggcttctgaatcagatggaagtaagtcttgaactcctggcctcaagtgatcctcctgcctcagcctcccaagtagctgagattacaggcatgagccaccatgcctggctagacagaagtaagtcaaatcctgaatctaccaggttcagtggctcacgcctgcaatcctagcactttgggaggctgaggcaggcagatcacctgagcttaagagttgaagaccagccttggcaacatggcaaaaccccgaatctactaaaaatacaaaaaaaaaaaaattagccaggtgtgatggcacatgcctgtagtcccagctatttgggaggccgaggcatgagaatcacttgaacctgggaggtggaggttgcagtgggccaagatcatgccactgcactccagcctggacaacaaagactctatctcaaaaaaagcaatcctgaatctgcctcttaccagaagaatgacctctgagcatttcccctgcctcccgaggccccgtggccacatgtccatactgggatggcagcgaggactgagcaatgcatgtaagcagcaccaagtgccacatgtccccacgagtgcgacacaagcaccagtgctcctgagctgcctttcttggcgtaccaagcagaatgttttaaaatgaagaccctgccccccagaactaaaccgcacccacagctccctctgtagtggcctgaccttcctcagcaggctgccctggaagacagaattgctttcttccccaagtcgcttgtaacaagctgttggggaggacggacagggcagcagtgggaacggagaagagaaaagaagtgtgcgtcatctccagtgcccgggaaagccgcaaggaaaccacactgccattttcagagagcttgacggggccctccctcccccaaggtctgctccaggctaacagagtatacgttgtgcagagatagcttcctgtgccaagatgtccaatccctgtcgccagggacttgggtgggggtggctgggggcagtggcagaggaggaaagggccgcagcataaaagccccttgtgctgctcatggaggagacgctgctgcccggcggatgggggaggggcagcactgtcatcttcctttttgctctgagaaggtgacttgtgtggttagatggaaggggcccccaaatgagtccaggaaactggggcgcaaaagggaagcagctcgtgtgcttgtgtggtctggaggggccgacccttgccgtcgacacccctagcacagagctgaccacgcattgcctggttctgggtcccgtgcagagcataaaagaggtgacccaggctctgctcccagggaggacacaggagagagaaaaacaccacacaacgaaggctggggacaagggctgggcagtaccagggccagggctcatgagcatgcacagtccatgctgtgataagatgacgaagtcagcctgggagggcctcgggggaaagagggcaaaggatgtgaaggccccttataaagcacggagctctagaaacaggagtagaagcagtgggagggcagagcagccaggcacactcacagaccctgctcctggacctgggctccgagtagccaggcacactcagagaccctgctcctggacctgggccccgaggcttggatgtcaattccctgcagacagtggaagctacttctgagacagttcttctcctggggaggcagggagtggggagtgcttgtcctggacctgagtggaaatagaaatgggctggccatctagctgtaggatgtgtcatgggtgtgccaggaagcaagagcagtagcttcaccatggacagtgctacctaccatccaccaggctccactcagggagcttttcctagagaaattcagttcattggtcagaacaatccactgaggtagatactattattctcatcttgcagattaggaaacagaggcacataagaaaagcaacgcatcaaggtcatagacccagttgatgaaagagccaggatttgaacccagggagtcaagccccagaatccatggtcttatatagcatcaatagtgcctattcatcccccgaacacatacaatgaggtatgagggggtctgcagtaagttaaacttgataggaaacaagacccacccactcccccaggctctcccacttagcttctcctcctgcctggccaggtcgcctcatagcctagaacaccccaaaagaggtaggttctggggccagagactagactaggcacagacttgactgctgtccctcgccttttttttttttttttttttaagttttgagacaaggtcttgctctgttgcccaggctgaagcgcagcagcgcgatctcggctcactgcaacctctgcctgctgggttcaagcgattctcccgcctcagcctcctgagtaggtgggattacagatgcatgccaccatgtccggctaatttttgtatttttactagagacggggtttcaccatgttggccagtctggtctcgatctcctgacctcaggtgatctgcccacctcaccctcccaaagtgttgggattacaggcaagaaccaccatgtccggtcttgactgctgcccttactagctacggggctgtggacgagaggcatctcagtgcctcaattttctacatctgtaaaacagggctcatcttgggtccatgtgtgatgattcaagagaatgaaggtaaaagacagcacaggactgggcacacaacaagcactcagcagagctcccctacataacactcatcattactgtggtccatggaccaagatgcaggatgtggccctgagaaaggcccttgtcatgatgatgctctgtgtttgagaaacagaactttaaaagttaaaattggctgggggtggtagctcatgcctgtaatcgcagcactttgggaggacgaggcaggcagatcacttgagttcaggagtttgagagcagcctggctaacatggcaaaaccccatctctactaaaaatacaaaaattagctggatgtggtggtgcatgcccataatcccagctactcaggaggctgagggaggagaatcgcttgaacctgggaggcagaggctgcagtgagcagagatggcgccactacattccagcctgggcaacaggcaagcctccatctcaaaaaaaaaaaaaaaaaagtataccctgtaactcagctgtgaattaaaaaattatttttctctcggatattattctgtcccagggcccccatttccatgaagtagccaaagaaaaaaaaaaggtcaatccaaaggaattcagtatcttccagtatcaatttcttttccatgctaatgattctcttttgggataatacttaggaattcaagaatcgagatccctcctagggctgtgacttccttctctcaaaaagactccccttccctccctgccctcctctcattgatggcttctgcacacagggaaagacaacagggaagcaaaagtcaagggaacacattttaaaaatacaccgtccaatttcaagaaactagattttcaacagatgaaaacagtagcagaataaattgcagagtccagatcatcttgtcgcattgcccaatggagttcaaacggattagtttgtatcaagagcataatgacaaaccaggtattattatgcaaggttttcatattgttttacagaatttgaactggggtggggtgggggagggaaaaagtaaggtctttggaaggtctttggtctttctgtttggaagacagaaaggactttgttttatcctgagctcctgatttcatgaactaatttctggtggtaaataacacttttttttttcttttttgagacagagtctcgctctgttgcccaggctggagtacaatggcacgatctcagctcactgcaacctccgcctcccgggttcaagcgattctcctgcctcagcctcccgagtagctgggattacaggtgcctgccaccaagcctggctaatttttgtattttttagtagagacagggttttactgtgtttgccaagccggtctgtatctcctgacctcaagtgatccaccagcctcgacctcccaaagtgctgggattacaggcatgagccactgcacctggctgcactttctagaagggtgatctctcataaaataattcactgaccatggcggtctacgattgcatctttccttcaatgccttcactttgaaaaatataaagggtggccgtcgtttgtcagtctttacatatttgggggacgtcttcattgtccaacaaagcccaacagtctcatagccatggatacaatctgcctttctcacatgatgcacgtagaaactgaggcacatacagtaagggccgagtgctcagtcaggttgtcaggtgcttgtcaggtgaagtcccagatgcttcatagagagatgtcaccaggaggacagagtgctgaaatgagcacgtgtcttaaaatccctcccaggattttctttgtctttgtaggagtgtaagagtgtgtgtgtgtgtgtgtgtgtgtgtgtgtgtttgcagcctagctgtcaggaggtctggattagagaatttctccatccttcaaaggaaaaccatctttcagagtaagtagtagcaggaagagatggatgacagtaactggatttgtaataccagtgaggccaaccccaaacacacacaaccatcaccctacatgtggattgtctgtgctaggagaagaaagtacaggcgtgaagagtgctaacttcagaacaccccaaaatcaactagatttttctttttgccatttttgaggtgatacatttacttttcgaatgacttccgttgaataatgttatttgttccatcagtcctggggagtgaagaaagtgggtcgtaaaagtctgccagacacagacgaagccagaccaagatggaaccttgtgggcaatctcaggttagcaggtaatcagatcattcacccatctgtccatctgtttatccaattcaacccagagattcacaagcaccaggctccatgatggcatattttgcaggcaaatggctattaagttcttcattctcctccacgtgttctggaaaatcaccaggtttccaggtaacgacgggattgtatttgtcagcacagaactggggatgtggaggacaaagtctccaaggagtagttcttcttccctggtaggatttctcagtcaaagaaaaatcttagacgtgcaactattgggcgatcagtggtgctaacacgggaacacacatcttactggcaaaacactgtcccttttatttttttttttctgtaaaacgttgctcttattgggagcttgaaaagcattatcataaaaagccatgggaagggagaaggggagaggaaagagagggacagagggggataagaattgcccaggtttggacaaggactctggagatgaggcccaagatgattcatttctccctgttcgcttcccagccctcaatcccatctggctcctttcatttgagttttctattgcaatgcacaaaacagataattttccaaaagcttgctcaaaagcttccaggtggtccaagaatgggaggggcacttcttgcagttcaaatgggacaagagaaaaaacatcaagaaagcggtgggggggagtgagcttcagaggggaagctgagacaatgaggaaagcagaccttttgagacatcctggatgttccctccaccctctgaaatggaaacatgaccagctacagacagatcagctcttagaggggaggaaagagccccagggttcaggaaccaggagctctgacttgagtcatccctgatgacttccttttccactctgagacttcagtttcttcacttataacattagagacttgggctagatcagggattttctgccaagtgcagaggggaactttcatggaaagggtggtatctattccatccagagtgttcgcttaggaacttgttccaaaagctcaactgctaaaaaaaaaaaaaatacttaagaggcaagatgatctttcaaagtcatgtccagcccaccagtcctacaaattcaagcctgttttcccagttgcagttgatgaaataactattctaagttctctctctccaaaaagatgaatcctgtgctcagtgaatctctgtggattgaagggatggatggatggacagactgatgaatgacttgatggcaaattacataggatggtgagaacctgtttgatcctggtctggctttgcccatgcatccggtggacttccttggcctggcccactttcttcacttcccagaacgcatgcaataaataacattatgtttttaagtcactagaaaagtaaatgtcaccctctcccctccaaatggcaaaaagaaaaactgaactgatttttgggtgtctggaagtgaggacttttcgcacctctatgctcccctgctagggtagaccatcaaaagcttggagtagcttctgacactttaattggcccatttcacatttctacccctctacgtagggtcacataaaagctatacttttattcccaacatgggaaaataagacaataacgagctttataaatgcttaattaaatggggggtgaaaaatcagggtataacagccagaatataaggatgttactattttgaaaaatatccaaagcaaagttggacatgtccaaagttacatgtaacttacatatatggtccttagccttctgcagatacaccttctgtacaagccgaacatagatttggatagcgacacacagtcacctttcctggtcaaactttttccttctggtactgtgtctagcaacctatgctaccaagctaccgcgtggtggcgccgtctgtccaccgctgccagccggcactttcaaattccactgtctctttgtaaggtgaggctgtgtagtgtggcaggatgagccaggaaaactgaagagaaggagctgccaatagatcactctagaattccagacagggtagtgtgataggttcaagagaagagcttgcctgcataaaataaaattgagagcacaatgtgcgattgcagataaagaatagaacaggattgtgccgaagtgactcaagggtgggaggggcatttttctgctgtgaaagggtggggacagtgggatcaagatgtcaaagtattttctccacaagtaccttagtgtcctcaggctgggtctccaattctcaggctaaaagccactctccagggagaccaggctgggaatgctgagacccaagttgctaggcagggaggaggttaagatcagcaactttgaggaagtaagggtctccctaggatgctccacgagtctgggagactgagtgctgcctggggcaggtctaggcattgcaagagcagctgcatggaggcttggagggagccagtgaagacagcttgcttgttcaaagatgttagagtgaactataattaaaatgtttccatgtgagttctccgagactcctccccgccacaacaatgaagtctcctttgtaacttctctacaggtaacctgcaagcatgctttcaataatctacaggatgcacacctggagtcccagctacttgggaggctgaggagggaggattatttgagcccaggaggtcaaggctgcagcaagctatgattgtgccactgcactgcggcctgagcaacagaacaagatcctgtctacacacacacacaaacacacacacacacaatctactggagcaaaagtagaggggctgcttggacaggtagacacacatgtaacgtatcttacacatacagacatgctcatctactagctaatgttgatgaatgaccaggaaaatatgtcaaaatatgccacttttctttctaaataaagggttgctttgttaactaatggctgctgtcttaaataattgttaatatatcaacatatatatgtataagccaggggaaaggatttatctgacttacgatctttcctctttgatcagagaggcaaacatatatcttaaaattggttttgatgcctccatgtgtaatttaatgggctatactacatccaaatgtagactaatcaaccatgcctcctttaccaagtgtctgggtgttgattagcagtagctggtccggtcatatcttggggatgtgttttgtggactatccatggcacactaaagttcgcagccagcctcctctgctgtgcacagcctgctctgggatggccgctgcacctgtaggtcaaggcaggtccacagactacaaacgtctcttgacgcgtgcttagtcaaagcttaaaacaggaagtggtatgtgaagctgagtgtttaagcataaacagtcttactctccctgctggtttgaatgatgcctgccactgagtgaagtgggagctgagggcatgtctcctctccagagaacatgttctttgaagtgacgatacagcagaaaggaaaaccgcttaagcatgcaattccccaagcacatacggtctgaagaattcctctgtgattgaaacagaaagaaactgctatgggaccagaacagaaagaagcaagctggggccaggcacagtggctcacgcctgtaatcccagcactttgggaggccgaggcgggtggatcacgaggtcaggagatggagaccatcctggctaacacggtgaaacccatctctactaaaaacacaaaaaatcagccaggcgtggtggcgggtgcctgtactcccagctactcgggaggcagaggcaggagaatggtgtgagctcaggaggtggaggttgcagtgagctgagatcgtgccactgcactccagcctgggtgaaagagtgagactccgtctcaaaaaaaaaaaaaaaaaaaaagaaagaagcaagctgtgtttcccttgaactacaggcctccctctgctggctgagagtcttcctaattcaggagacaatgacctctgaatgaacaccttggtgcaagctgacctggccaggtagggaggtggacagatgggaaggagctggggagggctccaggaaggtgaggaagtaacggcatctgtacaccagatggcagcagccacacacacatgataggcgaggtgcctgcctgtcttcttcccaggtcagaaacccctgaagtgggaactgaagacagtgccttcttggaatagttccttttcttgtgggtggctataatgccacaggcgacgtttatatgaagcctcctgcttcaacagacagggcacaagcaagaggtcataaaaaagacagttggcctcagagtatttaatgatgaatatgggctaaaaacagggattgtgtccactaaaggaggggtctaacgctttctgaaaagggtcagatagccaggtgtggtggctcacgcctgtaatcccagcactttgggaggctgaggcaggcagatcacttgagcttaggagttggaggccagcctgggcaaactcaatctctacaaaaaatacaacaattagctgggtgtggtggtatgtgcctgtagccccagctgcttgggagggatgctgaggtgggaggatcgcttgagcccagggggtcgagggtgcagtgagccatgattgcaccactgcactacagcctgagtgacagagtgagaccctgtcaaaaagaaagggaaagggaaaggaaaggaacaaaggaacagggaggtcagatagtaaatattttcagctttgcagatagtaagtatttccagcttttcagccttaagatttctctggccattatgcagatcagccactgtagcacatatggagccaaagacaatatgtaaacaaatgggtgcgcgtatgctccaataaagcctcatttccagaaataggtgttgggccaaatttggcccgcagaccatagtttgccaacccctccactaaaggagtcataaactatctggctcagttagcttggtgcacgtgtaccctgggcctgtactgggtaacgctttccccaatctgtgtaaatggagtccttcttccctctcagttcactccacggcacgagattaacctacgtctccttgtcacttggactcaaattctcccttctcccttccacgcgacaacaaaatcagctggcaaacgctgtctgtgggttctgtacgcaacagctcttcctgggatcagtcctcattctcatggtcatcacaacatccagtatcttcttcattgctgctaaaacacacagcagtggggtgggctgtaaatattctttttcagttggtgcattcttcacactggtttatctccccacctgctctcccagattattttatcttagccagatgcatgtttgagttacctcttgggtgatgtctcttgcctgcatcggaacccaccatagttgccaactttttgctgagtaatgcacctgtttctttcctgcctcaatccaatcctttatttatttagttttattttttttgaggcacagtctctctattgcccaggatggagtgcagtggcacgatcacggcttactgcagcctcaacctccctaggctcaggtggtcctcccacctcaggattcagagtacctgggactacaggtgcatgccaccccacctggctatttatatatatatatatatatatatatatatatatatatatatatatatatatatttttttttttttttttttttgtagagacagggtttcatcatgttgcccaggctggtcttgaactcctgggctcaagcaacccacctatgtcagcctcccaacatgctgggattacaggcatgagccactgcaaccagccaatccaatcctttagacataccttctctaaagcaccagaaaattctatctcagtcatatcggtttgtccaccagccctgaaaaaaccttggcacctaccttggcatttgctcagagtactacctgcccttatcatccccttaccaaagcagaccacccctatgctcctgatgaaatgtagaccattctatgaagagcccttgagaggagcaaaaagcttgcctgtcttctactggtttcttggtctggcttggatcaagccctttggagcttggactgtgttaatcttatgccgcctatgggcttaactgtcgattaataaattactatgggtatcttttctgctattgactttcaactatatcacatcgaaatcaagacaatgcggtctgaatggcattgatcttagggtatgtattctgactctctctgtggcagagcactctaatccattttaggaaccctcacgtggcttgaaatgaacgtaagctttctaatgactgggctacagtttatatatgtccactgcatgcattttgttaacttaatatctgcgtcatctacaagtatcagacagggacattaaactcccccaccatgactgtgtttctccttgcaattctgatgatttttcctttaaacagttcgaggcttatgttgctaggcgcctacaaacgcagcatcaggatgtcattctggtacattacttcccctttccttaagtactgacctttatcccttatctggctttctgccttcaagtctggtttgtctgagacaaaaatgtaatacccgctttcttttgattagcgtttgccttgtatctttcttcctttcaactttaccatgtcatattttaggtgtgccacttattaatcacttagaactgaacatttaaaaagcaaaacctctttgaagagatgaattccaccatctgacggctgaattatttcactttgattttccatctctcttcccagtgtttattcgttcatgcattctcacttccctcctccatcctatacctctctctctcattagtagttgtccttttagattcactagcatattattattttttgagacaaggtcttgctctgtcacccaggctgcagcacagtggtgcaatcacagctcactgtagccttgacctctcaggctcaagtgatcctcttgcctcagccccctgagtagatgggaccacagatgcacaccatgatgcctagatgattttttttctcttttatagagatggggtctcccatctttatactcagccgagcaataggaactataggtgtgcgccaccacgtccggcgaattttttgtatttttagtagagacgggttttcaccatgttggttgggctggtctcgaactcctgacctcaggtgatccgcccgcctcggcctcccagtgctggaattgcaggtgtgagccactgtgcccggccagccatgcccatttctttacgtattatttagggctaccttggcacttgcacgacagtcagtcaagcagttgtgacagagattatatggcccacaggccatctggaattctaagagaaagtttggcagcttctactctagaatggcagttactttttcttggcactttgaagacagcattcccctgtcttcaattagagctcagaaatcttctgtgagttgaactgtcgtttctgtgtagagaatccgtctctgcctccggtatctccagattctgtcccagtccctggtggatatggtttggatctgtgtctccgcccacatctcatgtggaattgtaatccccaatgttgggggtaggacgtggtgggaggtgatttgatcatgggggcggctttcctccttggtgtcttttgtaaaactattatattattataaatctatccattattaagtattaaaaagtgctttcatttgtgcaaccttatgcagtttttttttttaaataaacctttcattttagattagctttaggtctacagaaaagctcaaagatagtagagagagttcctgtgtaccctgccctcagtttcccctatcgctagcatctcactttggatggaacatttgttacaactaaggaacccatattggtgcattcctttttttgtttgtttgtttgtttgtttgtttgtttgaaatggagacttgctctgttgcccaggctggaatgcaatggcgcgatcttggcacactgcaacctccacctcccaggttcaagagattctcctgcctcagctcctgagtagctgggattacaggtgcccaccatcacgcctggctagttttttgtattttcagtagaggtggggtttcaccatgttggtcaggctggtctcgaactcctgatctcgggtgatccacccaccttggcctcccaaagtggtgagattacaggcccttttcttttctttatttttttcttttcttttcttttttttttttttttttttttttttgagacagagtctcgctctgttgcccaggctggagggcagtggtgagacctcagctcactgtaacctcagcctcccaagtagctgggatcaaaggcacctaccaccacacccggctaatttttgtatttttagtagggatgggagggttttgtaggccaagccggtcttgaattcccgacctcgagggatccgcccgcctcggcctctcaaagtacgggattataggcgtgagccacggcacctggccatgtgcattacttttaactacactatattcagatttcactagtaactacactatattcagtgtattcagatttcactagttcttccctaacgtctctttcctgtacaaagatcccatccagaacagcgcctcgcatttagtctccttcgtcttctctggactgtttcttagacttcccttgttttgggaccatcttggcagttttgaggagggctggtcaggtattttgtccctcggttcgggtctgtctgatgcatttctcctgcagttttgttatttctagttttgtgagtgctatctttcctgcgcagcggcatgtttccctctgtggtttgtctgtattttattttctatttgagtgtaagtgcaaccgtacttaagagtcctcctccttgcccccaggcatctggtgtggctggttagtggaagagttagggctttgtgtaggtaaggactttatgtttgttcctgctagagcctgaaagatttctattatcctaggccagtatttatgctctttatttgaggtttctggtacaagatagagtataaaagtttgtaccatacaccctttgtgtgatgcaggtctagggttttcctatcctgcacatcatttactatgccctataccccatctctctgtccaagatcctggagagaggacaagttgcacacgcaagttcctggaccagtgggtggagttttatagtcccttttacagaaggcaatgcctacaagccctggtctttaggctgggctgtttcagttccctgacatccaagggcaagggcacggctccatccgctccataggcaagaggtccaaccctcaatcctttgaagctctgtgaggatctgaaaccacctaccacggtgtctttgatttttccctttatttctagcatctggcatttctttctccttagtccttggctgtgtagtaaaaaccatgtttactagtttgtttgtttgtggtgggacatccatgtcagctgatctcaccatgttactggaagtactagtgacaaatgttcagcttctaggaagagttttttcatacaaattgtgttttctgcaatgactagcaaaatatgagacatataccactactcactaaagaacgggtgcatgaatgaatgaatgaatgaatgagtggagaccaggactgctcagaagataagctaagcatctgcagcctccgtggaggctggactggctgagtctgggagactccgggcaggcaggggctggtgcacagtccccctgcctggcactctgtgtcacagtggtcctggcctcatgcggccttattcaatgctgaggaccacatgatttcaccaatggctcatccaacagggttgcctgttcactttctactttcatcatcttacagtgtcagtgccttttcttttccctcttgaaagagggaactgagaatgagtgtgggtggatttagtgcaattgatcaagccaaagtctcatcctggattgcaggtggtcatctaaggcaagatactgccttggtgtatgaaccccatagcaggctgtttctgcagggctggcttctctggactctacacacaagcacagatgctggttcgaaagccccagcattatgagataactggaagctgcagcccttgacctccttgtgtcaacaggcacaacactggccccgacctgctatgagttgagcattctacagccttgcagggtggtaggctctgcctgtccaggctacagttcagcacatacctttccctcatggctactcaagtgggaaatcctcactctccactatccttttgtccctatcctcccatgaaatcctatgtgtagtgtgaactaaaggcagagaaagctaacaagtcttggcccaggggctgttctacatcttgccacccaagaagaagatgccagacatttagagaggagggaatcacaaactctacacgtttttcaaagtggggagaatgggctgaagggtctgcttgagggaatgttcttccctcgttccttctctgcagcctgcattgcaggggtcccctggccccagtactctgtggacatagtggcaatggcagcacagctccatcattcctgcccctcaggctgtgacaataatgggtcaggtgtgggggcatatggaccctccagtgatgcttgtatagcagagggtctcgtgaggctgaaaacaccaaggcctgctgccccgactccaccccagttagaggatcctgtcgagggcttttgtaactgagagagaatctgtttggtccggggaagggaggagctgagttggaaatatttttgctccactttcttccaaaatacttataaagactggcagaaagtgcaggtgacagaacagaagaacatcggagttgacatgatgatgtcgcgggggacgtggtgccaccagagagcctggcctgtgagttccatgcctggggcacagctgtcacttgctgggcacagacctctgcagcgtgtgcggtttcctgcgctctgggaggacttggcctttgaatgtttataaggtcacaccctctgggctcttcagccccgtggatactgcttgactctgaagtctcttgtggtctagtggagtcaggatcaaaactgctgtgccaggggcagaagagctacatgcccccaccccaggccccgcgcttagaagagcagtctgcagggtgtgacgagtcatcattagcccttgttttgggtgacatttcttacattctaaaggctctgccctccttgtctaccatctcatgtgattttcaccataagcatcattttaatgaatgacttgggagtctgagaggcaggaacatgaagttgagaataagaaaagtttcgccctggaacattccagcccatgcacatattcggggcttcatggagcaggcacgcttcttaacgtacagccttagaattcagcgaccagcaatgactacatttaacacacaggggctccatttcagctggggaaacagatgcaaggaagcggcctgaacacagtcctcagggcgcataaacaggccccacgcaggcttggtaaccagggaaggatggaaaaggggttatgtgagaaattcgtttctgacagtcacgatcaatgggtgcaggagggagtgctatttccttgggggagtcagggagaatattttgggactgcatcagtctgaagacagtgaatgagctccaagagtgataaaccagtcgcccttgagccactgcactgagttatgttttaaaataactgtgaattcaagtacctttagatagtgcgcgtgctgtttaaagttcgccttattcctcatggttcccagctgtcttcacctgactgtctccacccattttgatgatcttttagtcccctgaagccacttgagtttgctgccctcagatagaaggctccatcctgcagagtgtggcatttatggctttatgggcctgggtggaccatggaaaccacagctgcacgatgtctagagaacagcatgtgatcccaaggctgtgaccttacctatgccctgtttatttccaggcaggtagaagagcaaagaatttacaaggcccagtgcttctgtatggaaggtgagggaaaacgcggcattgagagtgacggcagggttggcttggtcaactgggtacagcggtgacagggaaccctggaggaggggcaggttctacatgacagcagatggagaaatataggaacatattcaggacaaaagactcagctggagcttgacttgggtatcatcagcaaacacatggaaaataaagtcacaaggacggagaagattgcccagaaatggtgtgttcagtgagaaggaaggatgctctggatacaggtccctgggaacatcacctcttaagaacaggccataggatgacaagcccaccaccaaagggcctttccaggagcaggtggaaagagagagggaaacgaagggaccctagcatcaagaaagacaaagggagggcttcaaaaaggaaaggcctgaagagtgtcagcggctgcctttgttttttgtcattagtcttcacacctttgaagtgcttagagtacagcttgcgattctatccatgctttgtttccaaaatgatcatcacccacttaatagctcagttgaaagactcctctcttaggagactcctctctcagggatggccttcaccggaccccatgtggcctccatcagtcttggtcctgtggggctggggtgctgaacaataatgcacagacagcccacccaggtgacacgcacacccagagcacccctgggtgcagaaccatgctctagggtcccaggatgctggcttacctggcactctcaaaggtagcagatgccgtcttttctatagccccaaatccaactccaacagcgagaccctctgaaatagatgtaagaaaagcaagaggggttaggaatatttccccataaggaacatcaccatcactgtcactgcattaagtaggactgcatgaggctgccagtcaaagaaaatcatcgtaacagcagcttaaacccagggaaactaagtcatgggggccaaatggctgctgccttcttctctatggcctgcaacctaggaatgatttttgtattttttaagtaattgaaaaaacaatgactatttcatgatacatgaaaattatgtaaaatttggccaggcacagtggctcatgcctgtaatgccagcactctgggaggccaagacaggcagatcacctgaggtcaggagttcgagaccagcctggccaacatggtgaaatcccatctctactaaaaatacgagagttagcagggcgtgatggtgcacacctgtaatcccagcgactcgagaggctgaggcaggagaatcacttgaacacaggaggcggaggctgcagggagccaagagtgtgccactgcactccagcctgggtgacaaagtgagactctgtctcaaaaaaaaaaaaataaaaataaatttatataaaattcaaatttgagtgtctgtaaatgaagttgtactggcacacagccatgctcattggctgacgaaatgtttatggtgggtttcatagtacatgagcacagttgagtagttgggacagaaactgtatggcctgaaatctaaaatatttactttctggaactttcataacccctggcctaaacacacagggctttatttattagctcatgcaacagaaagtccaaggttgatacagcagcccaaagatgtcactgcagacataggtgtctttagttttcatttttttttccttcattctcaccattaggtcctcatagttgcaaagtgactgtgctacctccaggcatctcaattacatcctaggcaagaagaaagtagaaaggtagaaacctttctttaacaagtctttgtctcattactctggaaggaacatctttcccagcatccctcatacctcttcggccagaacaggagcaaacgcccatccctagatccatcgcagcctcaggccccaaatactgagactccaggaccaattgaggccagtctcaatccctctctggggctgggaaagagtctaccctgcccatgctccctgaaatcaagggagccaccatctgaataaactggggtcttgtcagtagcaaaggaggaggggtggcgtgatcaccaccaccagcatgcatttttatttttatatttttatgttttattgagaacggagtcttgctctgtcacccagactggagtgcagtggcatgatctcagctcactgcaagctccgcctcccgggttcacgccattctcttgcctcagcctcccgagtagctgggactacaggcgcccgctaccacgcccgtctaattttttgtatttttagtagagacgggctttcaccgtgttagccaggatggtctcgatctcccgacctcgtgatccacccatctcagcctcccaaagtgctgggattacaggcatgagccaccgcacctggccaagcaagcatttttatatgactgctctttgaagaacattccagctttcaaaggaaccaccctcatatggtgcagacagatgcggtctacactgatggggtggctggagtcgagtgtgcagcgtggggctagacaagatgggttttcacgtcctttcctgtggtacatgggcttgccaagttcaccacccactcgcctagggatcagatgtgggaggatgatgctggtctgcgtgtatctgatggcgcagcgagggtcatggaaggaaatggacctgatccagtggccacggaccaaaggagtggaagcacagcatcagggcgcttctgacatctgtgaagagggcgatgattcccctcgatccaaacacgaaggagaactactgaattaccaccactgttcaggagcaaggccaagggctttgggggtcaaattcgaactttcttttaagaagagggaagacataaaaatcgactgaatgagaggaactcgttttcttttgattcattgcctcttagtacagcgcatttctttcttgtgtcctgtctgtttgaagtgggtccaggatgctggaattgtgacactgactccaggagacacctggggacaagaaggcagcggagacttatcccatgttcaggtgaaagtgctcacctgtgatgcactccagctcaacaagagtccgcaatggggtctggagcccaaagatcctgctaaggaataaggtgttcttttttttgcctaattttaccttttgtgcttgatctcctgcggggtcctgatgggatagctgtgatcactgtaagctgcaggttgagaatttcggattttttttttttttttgagacacagtctcactctgtcgcccaggctggagtgcagtggtgcgatctcggctcactgcaacccccacctcctgggttcaagtgagtctcctgcctcagcctcccaagtagcaggactacaggcatgcgccaccatgcccagctaatttttgtacttttagtagagacaggattttaccgtgttggccgggctggtcttgaactcctgacctcaagtgacctgtctgcttcagcctcccaaagtgctgggattacaggcatgagccactgcacgcagtgagaatttgggattctgattccctaccaagtatctttccagttataagaatttttataacaaccaatgtcaggacacggagtcctaggacaacagaggtggaggaaactgcagagatcagccactgtgactcctgggccactgtcagattcagaagccaggtagtcagagggaggtctttccaaaaccagacagcagcatcaagccttctgggcccggcctctcagcgtgcacgtgcacaccttagcagcccacagagaaggctccaaaaccctccctttaacagctctgaggctgaaggtggctggctggagtcagcaccaccagagcaaccaggctttaaaatcgatacgcatttttaaaaattattttttatttacagtggacccttgaacaatgcagggattaggggcgccaatcccttgcacagttgaaaacccacatataactttaaactcccccagaaatgttactaatagtctaatattgacgttaccaagaacataaagtcaattgacacatattttgtgtgctatatatattatatacagtattcttacaagaaagtaagctagataacacttcttatatttttacagtaaagcaagctagatagaatttctttccttttcttttttttttttttttttttttttgagatggagtctctctctgtcgcccaggctggagtgcagtggcgccatttcggctcactgcaagctccacctcctgggttcacaccattctcctgcctcagcctcccgagtggctgggactacaggcgcccgccaccacgcctggctaattttttgtattttttagtagagacggggtttcacaccgtgttagccaggatggtcttgatctcctgacctcgtgatctgcccacctcagcctcccaaagtgctgggattacaggcgtaagccaccgcgcccggccagaatttcttaatgttaagaaaatcataaggaagagaaaatacatttacagtgccgtactgtatttatcaagaccgtacgtttatgttgtctgtttataaagaggagttgtgtgtctgaaatggtaggcacccacagctgcagacctcaaactatggtacatatcaagcaagttcattttttcttataacgtcatgacttttttctgcttcttgggagcacttccagcatccttaatggtactttgtgtgggtcccgtgctgttattcaaggtttacgatattgcactaaacatgacgaaaactacgtaagaactgagagagatcactttttacgggactatgcaattcactgcagagatgaactgctcatgaggagatgctcagtgtcacaaggcctttttttatttttattttttatttgtatttgagacggagttttgctattgttgctcaggctggagtgcaatggcgcaatcttggctcaccgcaacctccgcctcccaggttcaagcgattctcctgcctcagcctcccgagtagctgggattacaggcgtgcaccaccatgcccggctaattttgtatttttagtagagacggggtttctccatattgctcaggctggtctcgaactcctgacctcaggtgatctgtccgctttggcctcccaaagtgctgggattacaagcatgagccactgcgccccacccaacaaggccttttaagcagacgcccgcaacacttgagctcactgcaacagcaacaggaggtggctacaaaattgttacagtagtacagtgggctgtagttaattctatgtagttatgacttaatatatcgtttacaaaatgttttaatttttaaaaaagtttttcatagagatggtctcactaagttgtccaggctgatcttgaactcctagcctcaagcgatcctcctgcctcagcctctcaaagtgctgagaatacaggctaacactgcatctttacgtttgcttacatttctcttcactgtgagtggcaccatatatgatctgtgtttgtgggtataatttttgataaattttaactttttataatttgtgtatttttacagtaatcaatgatagactagactagtatcgacacatatatttcactgcaggtataaggcttatagcccagtgtctagcatacaaagggccaccagtcccccatttcccgaggcaaagaatcacagagacgttaggatcttgaagaggaggcctaatttggagcctagaggcctaatgtggagcactagtatttgcattaaaatgactaattcaaatataggtgggaactgtcacctccagtccacagatcagagagggaaggtgatgggagctggtctgagagacacaggtgggttctgagtccgaggcccagggtgttggtccttcattactcaaggaatatatatgatgaaagccataactcaagtatcagaaaggggtgtggatccatgttcaatattttaaggtttgcctgatggatgcaacatcatcaaaaagaggtaagcaagaatgagtacccagccgggcacagtggctcccgcgcctgtaatcccagcactttgggaggccgaggtaggtgaattgcttgagatcaggagctcaagattagcctggccaacatggtgaaacctcgtctctactaaaaatacaaaaaatttgctgggcatggtggctcacatctttaatcccagctactagggaggctgaggctggagaatcgcttgaacccgggaggcagaggttgcagtgagccaagatcgcgccactgcactccagcctgggcgacagtgtgagactccatctcaaaaaaaaagagtatcctacgtgaggtggctgacactggtgagagctgaatttcagggcaggctgcgatgggtatgcctaagggtttctgacatcctttccgttagggaggaggcagcctcgtttttgcagcccgagtcgtgggagctgcccgtgtccatggtcatgagaatatgaacttcgagaacatctgacctgctgccacctggccagtgtcctgcctttgaggagtccaggatttacaagcctgctgttctcaaccttgtttggcactaacacaccggagaccatcagtaacggtgggtctgcaaggcacagatcttcaccagggatccttggggagaaaccaagcaaactatttcctgacactagacaggcgtatccctccctttgagaaaattcactttctaaaaccataaacaacagctggttgactcttttgttaaaaattttccttttttttcctttgtgtacacatttaattttattgtaacagacaactcgtgcacttttaatgtttaaaactgagcatcatctttcctttccagggaaacaaaaagaaaatttaaaaataaacaggaataaaattacaatagagaatgtcaattccaaataagatcctacaggttctgctgattctcccattgagtggcagggctcaagtcatcattaggagagaatttattttaaaagtgtcatcttaaaccgcaaggatatctgtcagatatcacaattaaacatgccaaaggagaagccatgttttcaaaatgtccccaaaattttcttctaattagtcattttaatgcaaataatagtgcagcccagagcactaggacctgtgctaattagcaaaacaatcgcttggagtagcttagctcacagcctgagcttgctgacttgtgacataaatgctcacagcagctttgggagattggggaagggagcacccagtgagcagatgaagaaaagggcctgccctaggtgacccagctgggggggctagagctgggccgtaaaccgcagtctctcattgtttcctgcccccaagtgtcctctgctgcccagtttgcttgcagctttcccccagctacaacatggccccatgggtagtgaacactggcatctgagtctctgtaccctgaagaggtttggagcaaagggaatgcattttccctccggcccatcctgtacctcaggccaggccagtagcaggggacaaaagttcacaaatgagcattctgtgatggtttgcaaaggagcaggtccttcctctcaggtctgcagtggccctggcgggagagaaccacaactccacgctgccttaggaggcatcagcccactttccccctggatttagaaagcgaaacaggaagaagaggtcctgggggaagacaatgtatctgttaccgtgtctgaaaacagaggtgatccccgagagctaagctcatgagaaggcaggacacgttagttatgcatgcagaaggaacaccaaaacgagaattcaggccgacactgaagatcaacagacggtagaaagaactcactggggggaaaaggaaaggaggaaaaatgctgactgatgctcatgcccccagtgtcccacctcgagtgcaaatagaagaaacccaactcatactgtgaataacttcttgcccctttacacagctactgccattagctcagggaaaatgaactgcctggcctgggttagtaagtccgactgaacgcagggtgaggcagagtctggaagacaaacttgaacataagcaccaaagcggaaggagctggctccaacctcctcctggggctggaaggcggctctgcctgcctctctccacctccccattgcccttgcaactccatccctccatggcctcctctgcggaaaacagtaacaaaaagggcatgggctttggttgagataaacccaggctcaaatcttagtatattatttaaggttcttgcaaaaatgaaagggggataacactgctttgcttacaggatggctgtgttcaatgaaatgtacctgacaggcctgttcagggttccccactattgacatttggtagtcggggactatcctggccactctagggtggtttgcagcatccctggcctctactcactagatgccagtagcacctcctgtcccagttgtgacaaagatgtcttcagaggttgccaaatgttacttttcttctctcccaatgagggacacttacagaaaaaaaaaattaaactcttatattaatagaacattcttagagtttaagtcagtgctaggaaagcaaacaataaaaaacaagtgttttctttttcaatggagccataagcagctcttacttttaagggcatggggtggagtttgcagtcttcttgcccagttctggaggctgagaagtctgagatcaaggtggccgcagatttggtgtctggtgagggctagcttcctggttcacagactgggggttccttgctgtgtcctcatatgataggaagggtgagggggcctctctctcgggcttcttttatataggcattaatcccactcatgagggctccaacctcaaagcctaatcacctccccaaagcctcacttcctgataccatcgcattgggggttagcatctcagcatacacatcttttcttttttatttgagatggagtcttgctctgttgcccaggctggagtgcagtggcacaatctcagctcactgcaacctctacctccctggttcaagtgattctcctgcctcaacctcctgagtagctgggattacaggtgcgcaccaccaggcctggctaatttttgtatttctagtagagatggggtttcaccatgttggccaggctggtcttgaactcctgacctcaagcgatctgcctgcctcggcctcccagagtgctgggattaccggcatgagccactgcacctggcctcacatttttgagaaacacaaatgttgagaccacagcacctgacatttatgggcattggtaatgagtggatgggaaagggcacctgtacacggtagcttgagaagtgcaatcaccttggtttggcagagcccgctgctggggcagaaatggcccactcagaggtgctgtggggacattcttctcttcctgccagactatggtccctgggatatgggcccagctgtcagatcatctcagcaatgagaggggcttctaaataggatacagttgtttcagggtggtcagaccaggggtaggaactccagggctgtcattccccttgttctggacttgacccagacctcatggaagctcatgaatgcattcctcttgggtggttttctcacaggggatcccttctgggctcacaggctaactgaaagctcaatctttccctgtatgctgttgtgaagccactattctccgccctgtgcctgtaccattaattctttgtctcttagggcattatatggatgtcactaaatctctctgttccacgccatttgttctccaactgggcctctggtttaagcactcatagtatcagttttagaagttatagccagaagaagtctagaaaatatcaatgcaaaggccatgcagaaaataagcggtgatgctacgacttttcctccttgatttaaaaaagtatttaaattaagataagcagataagaccctgtggaggattaatgaatattaaacacagccactaccaccaccaacaaaccccaaaggtggagaaatgacgagttatgggatggcttattcatttccatctcccctaaagacagagtaagagaaaaatgacttaaattacagttagacggatttaggcaagaggcaaaactatgcttgagagaggagggctttgaaacatatgataaagaaactgaaggaaggtcaagggtgtccttctctgcatgaggagtgttctctgaaggtgggagctactcctcagtcagggatgactgggatggggagagaaggtgggttaggaagaacagggcaggtagcctcataacatccctcaggccagatgacacttcaccaataaatacaggctcagttctaggagcaaggctgaacatccacatgtacattctcaggtcccaaaaggcactcattaaaggacagaaaaataaccacgttgaggggtcaggtgtgatggctgacacctgtaatcccagcaatttgggaggctgaggcaggaagatctcttgggcccagttcaagaccagcctgggcaacatagcaagaccccatctctacaaaaaattaaaaaattggccaggtgcagtggctcacacctataaccccatcactttgggaggccaaggtgggtggatcatgaggtcaggagatcgagaccacagtgaaaccccatctctactaaaaatacaaaaaattagccgggcgtggtggtgggcacctgtagtcccagctactcgggaggctgagacaggataatggtgtgaacccaggaggcggagcttgcagtgagctgagatcacaccactgcactccagcctgggtgacagagcaagactccgtctcaaaataaaataaaataaaataaaaattagctgggtgtgctggtgtgcacctgtagtcccagctactagggaggatgagatgggaggatcacttgaagctaagagtttgagaccagccaggacaacatagtgagaccctgtctctaccacacacaaaaaaattggctgggtatggtggcatgaacctgtggtactagctactcaggaggctgaggaggaaggatcgtttgagcccaagaggtcaaggctgcagtgagctatgatcgcaccactgcacttcagcctgggtgacagagcgagactctggctctaatttaataaacaaaactaaaaacaaaacatgttgaaacatctattgctggagtggacaatgggggctttggggacagggtgtgcccacctccagctgcatcaggagcctctgaggtgctggacaagctcagatttatttaatatttccatttgagacagaatcttgctctgtcacccaagctggagtgcagtggtgcaatctcagttcactgcaacttccacctaccaagtagctgggactacaagtgcacaccactgcacccagctaatttttgtatttttagtagaggcggggtttttgccatgttggccaggctggtcttgaactcctgacctcaggtgatctgcccacctcggcttcccaaagtgctggaattacaggcgtgagccaccgcgcctggccaaggacaagctcggctttgattccttgtctgtcccagcctgtctgggaagtgtcactaaactgggagaggacaacacactagggacgggagcaacgtcacgtaacactgcagcagggatttcctggccacagtctatcaggagagccgactcacaggcttagacacaccatggggcagggctgctgtcttcattctcactctgagccccaaaacttagctgagccttctggggagactagctggctgatgatttgctgataaccctgcatggcgtgtctttggttgcaaaggtctagcaggaagcaaaaccaagaaggcaggaactctgatcatattacacaattattaaaccaaatgttggtagaaccagccaggtattattgccaaggaatccctgtggagtctgttagaggctgtataaaggatggaaacttaccaacttattttcttgaaaaagtagtttgatgcagttttccagtgtggattactaatcctgctatttatattggaaaaagatacatgtggggaaagatgaaaaatagaagtgttctagaaaagttgactttaaatcaaattcttatcaataaggccaggtgcagtggctcacgcctgtaatcccagcactttgggaggccgaggcgggtggatcacctgaggtcaggagttcaagactagcctggccaacatgggaaaaccccgtctctcctaaaaatacaaacattagctgggcgtggtggtgggagcctgtagtcccagctacttgggagggttaggctggagaatcgcttgaacacgggaggtggaggttgcagtgagccgagatcgcgccattgccctccagcctgggcaatagagggagactccatctcaaaaaaaaaaaattcttatcaataaagtcacatcctattgtttattaagaaatattgacaattgaagatactctaacatgaatcccctttgtaactaaaataactacttcctaattaatgttgacaagtgtgcttttttggcatatccgattgtttcacgttgggatccctctgaacagtgacagacccagaaaatgctattctccagtcatggctgccgacttagagttgagcctgactccagcagactgcgaagacacaggcagcgcctcgtttgtatgactgaagacagccacatcttcaaacaacaggtgaaggcatctggttaaacacccacatctcggagtcaatttcaatttgctttagttctcaataaccagacaaagatcagatctctgtgtttcctcagagaaaaagggagagaatgcctatactggcattgaagattccgagctgttccaactaacgagctccgtgtcatgcccagatgcatgcctctagccaactcccctgaccttgcaccatggtcgtccacacctgggtttgccctgaatctgaagaagtatatctgcaggcccaaggacagaccaagtacgggagaggggccagaaagggcaccgcagtctaccctccgggcctctttctgccgagctgagcacacacagttgttggtttttatttatttatttaatgaataattgcttataaccaagggagttgttagttttgaggtcaagggactaagcagaagcaaagaggcaggtgaggtaggttctgactcagtgggggaacctgccgtcagaagagctgccatcttggaagacacaaaaactcaagattccctctgctttgcccagcagggaattatcatgaaatccctgtgccctttgagtggggagggctgctatctgttgctcccaaacactctgttccaccaatgaagccgtggtgtagaaaagcttgcaacccggtagcaaagttccttgactctgaagtcagagcctcatcaatcacctggccactgggcttcctctccctacgtccaaagtccacggcaggcagggaagtgtctggatctgacagattcactgtatgaaagtggacaggcttatgttctggggaaccttgtatattcacaacaaagttgtctgggaggcttagaaagcagggacaacctaagcagctctgtaaatatgaggacacaggacgaaggaagcatgaggcaatgagtagtgtggtcagacgggaattatttttcccaagacaagcctattttgtgataagtgggccctgggcagcagaggtgggcaggctctctggtccccttgggaaaccggggctgcagatggaggctttgctaagtgccaccccaccctagacagtgggagcagtccccagccccacactgcacaccgaaggcaggaggtctctaatcactggtcacagggatctctctgcttgatcctaggaaaatgctgcctctgaggtgggtagaccattccaggaggaagaggggaaagcatggctgaaagcacctctatgactccaggctcagattcgtaaaacactagatggaagtcgtaccaggaattcagccacacatccctcctggctgggaaggcctgcagctgagagcacacgcacaaagagacacaggctccattggcccagcctctcacctggctcatgaaaagatcaatgccaggagttctccacaaagagactggggattcctggggcaaggcacaagccagatgggtcgaggaatcaggtgaacctctgcagcaggtgggtggcgcccattctgtgccccttgggagccaagagagtcaccctgggaattatcccacaagagggtctcacatccccaggaagtggatggccactgatccctgctattcctcccccaagttcacatgaagaggtcgtgcagtctgggtcccaggttggacccgattgccttgtcaaagggaaaggcagcctagggccagatacctcggaaccacaaccacatcgcctgtgattggagcctcaccccatcccacaggccgtacatgggcatcatgaactctagcacacacttgactatggaatacctctggaggtggggtggggggtggggaggacttatttatgtttttgtaatttgcatgttcttgagggcctaaaaaaactggaggaaaggattttttttttttaattcccttggaggactttcgaacaaaattagactctggcagttccttcaggatgatgaataacctaagatacaggttcatttatcactccccacatgtgattcccaccaaagtatttctaaaatccaggcaagaaaaagattctgaagtctcagatcactagtatgttttgctacatggagggcaggcatcataccacaacgtatgtatccaagggagggaggggcattttttcctacaagcagaagtatttcaattgttaatggaggaaaaaaaaaaactgccttccttacacatcccagttcagcaattgtcaggcttcaggtgtcagacggcagcctgtcagcgccctgggataggccccgtgtggtcatggccttgttggtcatgccaagatgatgtctgagaagctggcattatggcttagctcaaagagaaggcaggaggctgtgcatggtggctcacacctataatcccagcactttgggaggccaaggcgggaggatcacctgaggtcaggagttcaagatcagcctggccaacatggcaaaaaccccgcctctactaaaaatacaaaaattagacgagcgtggtggtgggcgcttgtaatcccagctatttgggaggctgaggaatgagaatcacttgagcccagaaggcagaggctgcagtgagccaagatcacaccactgtactccagcctgggcgacagagtgagactccatctcaaaacaaaaaagtgagcgtacaatattggtgtgctaacatatgattatataatcaggttgctatatgaaggtaaggaaaaacaatcctaaagcttcaaactcttcccatttgaagaagacagttctaagaatcgtggcccccatcctctcatcgtctaggttttaattaggttctttccttccttcctccctttcttattaccatttttaattgtgataaaatgtgaatgaataacatgtaattgagcatcttcctcatttttaagtgtacattcattggcattaagtgcaatcacttttgtacagccatcgccaccacccatctccagagctctttggtttttttttgagacagagtcttgctccgtcgcccaggctggagtgcaatggcatgatctcagctcactgcaatcttcgcctcctggattcaagtgattcttgtacctcagtgatcccagtagctgggagtacagccatgcatcactatgcccggctaattttgtaattttggtagagacagggttttgttatgtcagccaggctggtctcgaacccctggcctcgagtgatctgcctgccttggcttcccagagtgctgggattacaggtatgagccactgcacccggctccagagctctttttatcttgcataattgaaactctccacccactgaacccagatccccattcctcctcctccctcccacagcccctggcaaccatccttctacttcctgcctctgtgccactgactcctcaggtgtctcgcagagcaggactcacacagtatctgtgatgccctctttcttatgtcatattatccccttgtgtcccttcttcattttgtcagggggcctccttaacctcctacgggatgtgtgggtgataaacttctgaaccctgacatagaaaagaaaaattttgatttttctctgtgacttaatagcttgacttgaaagtgctgcatcccaagttacctctccttaatatctttttttctgttttttctttcttaagatggagtctcgctctgtcacccgggctggagagcagtggcgtgatcttggcttactgcagcctccgcctcccgggttccagcaattctcctgcctcagcctcccaggtagctgggattacaggcacgcaccaccacgcccagctaactttagtatttttagtagagatggggtttcaccatgttggccaggctggtctcgaactcctgacctcaggtgatctgcctgcctcagcctcccaaaagtgttaggattacaggtgtgagccaccacgcccgggccttagtatcttttttctttttatttatttttaagacagggtctcactgtattgcctcagctggtcgctaactcctgggctcaagtaatcctcctgccttggcctcccaaagtgctgggattacaggcatgagccatggtgcctggcctgctcaatgtcttgagggtattgttccatcatcttccagtatctgatgctgctgctgaaaagtctgatgctaattccattctcatttccttgtatttaagaagacttttctctctggaagctctcaacaatttcatctttgtttctggagtttttgttggtggtggtgttgttttgatttttgagataggtctcactctgtggcccgggctggagtgcaatggtgccatcatggctcactgcagccttgacctcctgggcccaaccaatcttcccacctcagcctcttgagtagctgggaccacagatgcatgccaccatgcccagctaatttatttttagtttttgtagagaccatgtcttcatatgttggccaggctggtctcgaactcctggactcaagtgaccctccaacctcggtctcccaaagtgctgggattacaggcatgagccactgcttgttttcagagttttgagattcatcaagatatgtctgagtggggtattttctccattcccactattcagcattaggtggtcttttaaatctacaaggttgtgctttttttcagctcaggaaaaatttccccacatgcctgcacacataccttacatctttgactttgtgtttgggaactggagaattgtcttctacttaaccttccagataacctgcttggcctttcattcagaatattctaatgaatctatccatttaactttctaaaagaattctggcaattatacgatatgattaattttcaagaactctttcttattctctgattattcatttttatcacagtcagttcttgctttatgagcatgataaatatgctcttgaatctccagctgaacatactgctttgaatttttatgttcttctgtctcctgggctccctgttttctccagagtaggttgtcctacttacttcagtccctttttttcattctttgggtttttctcaggtgtctggggatctgttaccttcagagcacattcagggaggcgggttgacattgacgatagttggaaagggcattctccagggttgtacaagtctgtttccctaacaggcctccctgacaactctgaaatttcacttcaaagtatttccttaaagaactataagtagaactaccactggatccagcaatcccactactggatatctacccataggaaaagtcattatacaaaaaaaaaaaaaaaaaaaaaaacctgcacacacgttcatagcagcacaattcacaactgcaaaaatgtggaaacagcccaaatgcccatcaatcaacaagtggataaagaaactgtgatatgtatatatgtatatatatatatatatatatatatacacatacacacacacacacacacacacacacacacacacacacacacacagtggaatactactcagccataaaaaggaatgaattaatggcatttgcagcaacctggttgcgattggagactattattctaagtgaagtaactcaggaatggaaaaccaaacatcatatgttctcactcataagtgggagctaagctatgaggatgcaaaggcatacgaatgacacaatggacttcggggacttgggaaagggtgggaagggggtgagggataaaagactacaaattgggttcagtgcatactgctcgggtagtgggtgcccaaaaagctcacaaatcacccctaaagaacttactcatgtaaccaaacaccgtcgcttccccaaaaacctatggaatttttttaaaaaattaattgaaagcttaaaaaaaagattatagcttcaacttagcagttggcctacagaggatgaggaaggatgaaagaagagagggaaagagtgtgggaatcataaaggtaggtgctgtgggtatttagattccaccattacagcactggaatgatgggacagtggattccttatgtggctccctcctaagcagaaacaccaggggtgccgggccgcagccggggtgacacatgccaggagcaagtagcaggaagtgcagagccaaccttgggagcagaccaatgctgacacacacaggatgcagtgatgatgcagagaaaaggagtgtgtgcaggtgtggtttcagacacgtacacgaatgcagtgatggtgtgagcaaaagggagtgtgcacatgcaagcatgcccgtgtgagtgtgcatgcacatacacaaattcccacacaagcatgcatagaaagagacttggagatggccttctaaacacacaaaaacaaaagtctaaatcagtctcttaagtcctgaaacactagaccatccttacatgaaacctgcctttttgtatccacaggatagccctaacaattaggcagggccagtgtgtcacggggacactccaggactggtctctgattaggaatgtcaagctcagtgtggcccatgaacagggatggtgagggaagagagagaactgctaagaggtggtttgaacccggctttcaaacagctgctgggatcacagatgtgaaatgaggaaaggtctgtgaatttgtctggaaatgaaggaaacctttgcaagtaaagtgctagtgaagacatggatcaaagtcagattgcaaaggagtgaataagggcaacgaaatcaggaggcgaaggccatatagcaatggagggactgggcagagaaggtggagcaagttagggctacgcctgtcaggagtgagcaacagtgtctttaaaacccacatacaaaagcaggaaatgccaatgccaggggagttgggaggatgaccatgggtctccatagacaccggcaacaggtcaataacagccgacaatcaaggtaccatccagcaagggtgcaggcaagataatctcataaatcactgcaaaacacttggtaaatttaaagtcaggcataaatgccaaatataaataaaatatgcaactcaggcagcaaggtgctctaagcctagaggccttcttttaattaatgtcagatttgatccaagacattctcaggctagatgggcaggcaggtgctcagagaatcccgccctgtgggactggcctcctccctgacaagcttcaccaccaggccccaaaattcaggacacagggtgcttctctcctcagctgccaccacgtggaatctgctctccccactggtagatgcaaccctgtgatttctgggagggagatgccaaactgaactagggtagctctggagagccgggagctaatagttggctgacagtggaggggaatgagccaaaggttgacgctgttccaatcccaatatgggtaacgtttgaaaatggaggttagcacctcacacccattaggatgtctactctcgagaaaacaaaaacataacagtgttggcaaggatgtggagacactggaacccttgagcactgttggtaggaatgaaaaatggcacagccagtgtggaaaacagtttggtggctcctcaaaaaattaaaaatagaattaccatatggtgatagcagttgtgacgttcctgaggttccgttttctgtctctgccaaatatttctgttatgggaagtcctgattcacaaggaggtggcaattctacttctggatacatccgtcaaagcactgaaagcagggtctcaaagagatacttgcctacctacatttacagcagcactattcacagcagctcaaacctggaagcaacccaagtgtttatggatggatcaacagataagcaaaatgtggtatatccacacaatggaatagtatactgccttaaaaaggaaggaaatgctgacacatgctataacatggctgcaccttgagaatattatgctgagtgaaataagccaatcacaaaaagacgaatactatatgattccacttacgtgaagtacttagtcaaatgcttaaagacagagagtagaatggtggtggccagaagctgggggaagtgggcatgtggatactgcttaataggtatagagtttccattttacaagatagaaagaattctggaggtggatggaggtgatggttgcacaacattataaatgtatttaataatccaaaaccacagccttacaaatagttaattaagatggtaattttgttatgagtattttaccacaattaaaatatttggggagaaaaaaaactaaaatgaaggctaaggtttaaaagtggtgcaatggccgggtgcaatggctcatgcctgtaatctcagcactttgggagaccgaggcaggtggatcacgaggtcaggagtttgagaccagcttggccaacatggtgaaacccagtctctgctagggaaaaaaaaaaaaaaaccaacacaaaaattagccaggcgtggtagcgggtgcctgtaatcccagctactaaggaggctgaggcaggagaatcgcttgaaaccagaaggcggaggttgcagtgagccgagatcacgccactgcactccaccctgggagacaaagcaaaactccgtctcaataaataaataataaataaaataaaataaaataaaaagaaaaaagtggttcaaggttcaaggcctgaagtgggagctcgcactaaactcttaggggtaagaacaggtaagacccgattcaagtaaagacaggaatcccatgagccaggacatgaatttgactcaatgaccctgaagatggtggccccctaggatgctgtgatgactcaattgagtttctccttcagagctgctcccagttatttcctggtggtgggaaaggtgggcgctgagtctctcccatgctctcctagagcatcactgctgagtaaggatggtccaggggttggggctgcctatggtcgagaggacagtttcggttgtgggacggctttttgtctcccagggcaatgaaacctgccttatgccaccattagtggcaggcactcccaccatggggcctttgcccatgccatcactctattctctgtctggcacatttttttttttttttatcccttcctgcctacttttcttcccctggtcactggctcctcatgcgtcatttctcagtctggaagtcctctcctccaggcagccatcgctggctccctagtctgggttaggatttctgttaaatattctcaccttattgtgtgtttgctgagtgtatccaccgtggtgtcccctggatctagaccaggcctggggacctaggaggtgctcagttagtattttgtttgtttttgtttttgttttgagatagagtctcactctgtctcccaggctggagtgcagtggcgtgatctcggcctactgcaacctccacctcctgggttcaagtgattctcctgcctcagcctccccggtagctggtacaacagttttgtgccaccatgcctggctaatttttatatttttagtagagacggggtttcaccatgttggccaggctggtttggaactcctgacctcaggtgatccactcgcctccgcctcccaaagtgctgggattataaatgtgagccactgctcccagtctttagttagtatttattgaataagtaaagttaatcatggattggatcaattagtcagtcaaagataatgattataagaaaggtctggaagacacagtcaagaaggagtttaataaaaatgtgacaataagacaatacttggttactttaattgcaatctctagctacatgtggcatgctctggcagttcccctattcaatcaacattccctctttacccgttttaacagaattctcattttgttcggtattgaaatgtgcctggataaaaatattcagtttccccatctttcttgtggcaggaggtagcccattgtcatagttcaggccagtgataccgcagttaagggtttcctggaaagtctttccttccctaatatagactccaacccatcctgaagaaaggttaaaaaagggagatccttttccttttcttgcctggaacacgggtgggatgcttggaaccatgaactactgggaaggtcaggagataaacaatggcaaaggcttctgcacttggtcacttgagcagcccagaactgacagccacccggacttcacactgtgtgagacacagaaatccccacctgtggaagccacagctgcccagatcggttgatacttgcagccagagtgttcctaacttgtatacgccaaccggaacattctacacaggactgagatgacccatggatgacagcaattataaataatcttggcgacagcctggctaacatggcaaaaccctgtctctactaaaaccacaaaaattagccgggtgtggtggatgcctataatcccagctacccaggaggctgaggcaggagaatctcttgaacccgggaggcggaggttgcagtgagccgagatcgtgccattgcactccagcctgggcaacagagtgagatttcatctaaaaataataacaataataataataataataaataatcttggaaaacaattacagaaaataatacagataccagatagcagaaaatggctggattttcaatatgcagaaaagatgatagactatataaaccaaataaatgtttttttgtggagccaaaaaaaaatcaaggagaggtcattaaaagtctggctcatgaatttctaaaacagacaaatgagcaaaggaacggaagtggtgatcaagagaaaccagggtggattcattaataataactcacttcacacaaactacaaaattcttttgattgaattttaactagtagagcaggagaatacaaaggattcttaaaaatcacgtgtctggatttccttaaagcttttgattgtcatgacagcatgtgaaaaagctttttaaaagcagtaacatcatggttcagttaactgaattcataactggttgagtggctactcagtgggtataaattaatgaatttatgcaatcttaggaggagataagccacatgtttggccattgctattgtccattccatcttaacatcaacaactctagaggagacataaaaaattcatgagaaaagcacaaagctgaaaacaaaggtaatatacttgatataaacaagacatagaattctcatgggtggaaaatgagctaaaacatttagctcagatctagtattcaagaaaaatataagattcttaatgtaggtataaagaactaaccaagagaagacaggtgagcagctctgggctccaaacaaggaagcgctgtcttgtaattagttacctgtgcggggccccctgccttgtgatacccagagaagtattgggtatgcagatgtccaaatgtcttaggtcatggaatcttgtttgttttttttcttcacaggtcacatataggttttgtgaagcatattttatttttttgacacagggtctcactctgtcaccaaagctggagtgcagtggtgcaatctcggctcactgcaacctttgccttgcaggttcaagtgattctcgtgcctcagcctcccgagtagctgggattacaggcacgtgccaccatgcctggctaatttttgtattttttactagagaagtggtttcaccatgttggtcaggctagtcttgaactcctggcttcaggcaatccacccgccttggcctcccaaagtgctgggactacaggcgtgagccactgtgcccagccattgtggagcatattttagcataggctatttagaaaagacatccaagaaaaccatctgcttcctgtagagagccagtatgatccatctgagccttttgctccctcctattgatgaggctggaccctgggctctgaaacagagaggtggcgttggtttccgtgtgggacactgaacaatcccacggccactgagccaagccaatctccaacccacaccacctacacaccccatctcctaccctgaggagtgctgagaacatgtgggtgactcagcacagacctcccccaacactgggaaaccatttaaaggacaccttggtgtatcaacggggttgacatggtaaacacagaaggcatccttttcatttttattaagaacagatattcacgaccaaggaagtcagccatccccacagacatctcagaaccagctcggcaggcaactcaaatcactgctctccatggaaggctgtgtactcatgccacctccgatgtcacttactgtctgatctgccttccagccaccccactgggcaacgcctggagggaaatcctctggccaaggcagctgctcaacttcctacttgcctgttccttctgctagaatcccctttgtgggcactactgcccctttaaccacatagccatccaaccaacagccatctcatcacctgttccccaggactctgaccgcatctatggaacaaggtaaacagcagagtgcacgccccagctaaatttagcaaaataaagcatgttcatcaaattccaccccaggccttccaatttttgttttgttttgttttgagatggagttcgctctgctgcccagactggagtgcagtggcatgatctcggttcactgcaacctccgcctcttgggttcaagcgattctcctgcttcagcctcttgagtagctgggattacaggcacccgccaccacgcctggctaatttttgtatatttagtagagatggattttcaccatgttggcaaagctggtctcgaactcctgacctcaggtgatccgcccccctcggcctcccaaagtgctgggattacagatgtgagccatgcacccagcccaggcctcccaatttttaagttctattaaagcatttcagtgcaagagctcaaacataatgccaaacgtcagcagtaatgaaaggggagggtgatgtcttttgagaacttgctattttttagccattttatttcacattttcaaacataatccttctagccaccatggggtggagatacaatcaatgtctgcatttgaaagataagaaagcttgatccctgagaggctaagcaacctgggtcatacaacgttttgaaccgtgtctgtcaagcccaaactttttcttttttcacttgtctaagatcaagtgtgggtttggcccaggagtcccatcactgtacattcccagggaaagagatttctatttatgggccaattgcaatgtcctaatgagcaacatgcaatgctcagatcaacaggcatcaaagagcaaagagaaagtgagagaaaggcatgcagggtcatgctattcccataaagaggaggaaagaatacagggaatctactgctgatcagggaccagagccccattctggggtcagttatgagcagagagggacagcaagtatagacagagttttaggcgagtctagagtacacgagagataatgagttggcgaagcctgaccttctgataaggacccaggagtctggatgtgctgctgtcagcgtcagaggcgttggaacaagagcaactccatcttgaataggggctgcgtaaaatgaggatgagacctactgggctgcattcccaggaggttaaggcattctaagtcacaggatgagataggaggttggcacaagttacaggtcgtaaaggccttgctgacaaaacaggttgcagtaaagaaggcagccaaaaccctccaaaaccaagatggtgacgagagtgacctttggtcgtcctcactgcttattatatgctaattataatgcattagcatgctaagagacactcccaatagcaccatgacagtttacaaatgccatggcaacaccaggaagttaccctatatggtctaaaaagcagaggaaccctcagttctgggaattgcccacccctctcctggaaaattcatgaataatccaccccttgtttagcatataatcaagaagtaaccataaaaatgggcaaccagcagcccttggggcagctctgcctatggagaagccattcttttattcctttactttcttattacatttgctttcacttgactctgtgactcgccctgaattctttcttgcacaagatccaagaaccctctcttggggtctggatcaggacccctttccagtaacatcagggttccctcatgggattattgcgtacctccttaaccttgtttcctcagacccatggcagaccttcccattcgattcctactcaaacagaactctttctcagctccaggcagacaagcagaatgcccaggcggttccactctcacccatgtctgtgctcattcatgttcattactgcttgctgtgactcttcttttgagacccacgtagaccatttgggatgaggaaataggccttgatgtccagcatgtgagcattggtcctttttggagttctccctctaaactgtggtttccaattggctgccatggggtggaggcagagagaactagacctgaatcttcaaggagttaatttcctaaagaccacctgaccacaaccttaaagcacatcagactctcctgggacaggagaagctcccaacaggatttagattctcatccacgaaccctccaccttcctccccttctccctcattgcctcccaaatgaaaccaatgttctagagatcaaaattgagctccatggaacatcagtaacatttaaaagagttccacagttaaatattaggttaaaccatacaaaattgctgctatttaacaatgtttaaaaaactacaaaacaggaatttcctatggtccaacctaatgagttttagaaatcttaaatactcttcaagacccagaaccgacatcacattttataggcttgaagaattccctgcagcaaagacacctgtataattttgttttcctaatgtatttgacaacggaacccttttattagataacacctgttaacatcttacagaacctgtattttgtattttaggaaatactgcctgaaagaattcaaaataattaagagctgttcacaaactcatcctccaccatctcttgactgtatctgaataaaataaaattcacccatccatgtaggttacccatttattccatccataagtacttatcgagcacctcctctgtaccaggaatttgcttagaattggggacatactgaaacccaagtgttctgacaaaggaaacagggccctttaagatggagcgaccagcttcacttgaaggagccagaaagggcttcatggaaaaactgagttttgacttggagcttaaagaaattttccagcacatgaagctaacggtcagtgcccactccatccagatgaacccagctcacctgcttatatccggttccattttcagcacctacctcccaggatctttgcatctatggcttccacggtctctgcttgacttgtcttctcctgagtacccgaataaagctcggtttatccaattgcttttggatctagtgcctgatttcctgtgggctgctattttgccaggcactctgaagttagagtccagtgggaaggcccagggtcactaaccacaggcctctttcatgcaactcttcccagcctgtctcttcccgggcctcactcagtatctggctcaggaagttccctgtggcggagggaggagccatcttaatggctgacctttggggaggtgggagacagcctgggggctcagggagctgtgtgctgctctgtcccttggatttcaaatcctgggccttcctagcggttcagctgtggtggggacaaggcaaagctcttctgtgcttggcaaggacacaggggtatttatatagcttgatgtctccccacccctaatttcccttggttcatcagaataataactgaagtggctccccatggtgggtaactgtaggattggttaggggcactgggtccttagggggatgacagttttcctcctacagttccaggccttgtgtaccccttcagtgaccctctttctgactcatgcaataagaaaaacctacacggcatggtcagtgagacagcccaccgatggctgtggctgcacccggtgagggctggggcagactgaaactcagacacaccacaggccatgttatcgaagtcctgtgctcccagctcaggaggttgggtgattctataccttatggaagctatatgacacatctgcaattttgcagcccagcaataggagagaaaaatgagtatcagtgctggtggggagttcaggcacgtttccaaaaaccaaccacaaaaagtcatccatccagtgatggtggaggtagaccaatctgaaaccacctttgcaaaaaattataacagtgagaaaatcatggcagtgatctcaccaacctccatctctcctacaacctccaaactgcccttagtcattcttgggcttgggccaaggtaactttgggagctagtttatagtttaaataatagctcttcccccaaactaaactacctttgtaaagctagtgaaggatcatcaaattaggaggatgataggagcctgaatcctgccaagtgtagacataaatgactaccagctatctttccagaggtcaaaagatatgcgacttccccagtttctcctgcaaataaactaagactggccttttgaggtgtcttttctggttttgacatttcttccctggacccttgactcttgactcaatcggttctgaagctcccacctagcagcagactcagcatgcaaggaccattttccacaccccaatgattgcattcacaacaaatcagcagcacccattcccttgcctgtcaaactatccttgaaaaatcctagcctccaaattattggaaaggctgaattaaggaataataaaactttagcctcccattccaccggctctgcatgaattaaactctttctcgattgaattaatttcctcatcttgataaattggctttatctgggcagcaggcaaaatgaacccattagttcatctatggctataaatctgcctgggggtactctccttcagcatgcagagaactggtccaggaaggtccagggagctgggctggacagtgctgggcactttcctttcaaaggaaaacactagctatattccctcgcagccacaacttattaaaatcaggtcaatggcgaggtggctatttttcaagctggtaacaacatgttttgtcagtttcatctttgtgttctaatgtggccccaaagagagattcttttcccctattcagaaaggaccgtctgacttataacttggcccaatgctggctgcaagataatgggaaagttttcaacaacctcaagggcccagacagctctcagcatggccaggctcctccaggggccagctgagtaatgatctacagtcggcggatagagctggggcaggaatcgctgagctgctagcagctcctgttggcaaaagtggccgcaagagcttatggtggaacgtgggatgtgaatttcagagtgagaatgatgccaagcatcattcatcagctgaatgttcgtccctctgtgaatcacttattgctgcagggtcccagctctagaccagggagggtgagaatgacacctaccccacaaggtggaggtgaggatggagtgagatggttacaagggagaggcttccccaatcacacagcactgtgtgatgctggctgtcactgtcatcccttgttaagttgcgctatgggtggaaagacaattagtctggaagaaaccatcgcccaaaggggtatatacttagaagaagaattgctgggtcaacaggaccttttaaaaacatagatctcagcacctctcatctctgcttaaaaccttccagtggttttcctatacacaggagaaagttagtgttcacaccacctcaaggccttgtaccatctggccatgcctatccttctcctggcttgtagccacctggactttccaaatagtccttctccctccagccttggggccctacttatcactgcttcttctgctagtggctctttctctctcctttctgcctgagtagctaacatctacttgtctctcagatcgcagttttcaatataacttactcagagaaacctttcctggcctctaaactgggtcagatactctgcttgttatttgctctcccaccctcttttactagtgacaaagcaggagcattgccatcttggacaagcactgtcattttttaaagttcactgtgaccaaaagctgcctaaatccaaagggcatcagcctaatggctaaggttggcatgaccataaaccacaaataacatctctgaccagaaacattccaaacacctccctgaccagagacatgccagccccaagataacctcccctccagctggagagatgtcaccctcaagataacctcccctccgaccagagacattccaaccccacttctcccccaacttctccccgacacagaaacattccaagcctgtgataagctctctcaccaataaatattctttgtccataagagagagagctcctgaccaaaatcggccagaagcccctctcaggtttattctccaaaataaacctttgactgttgagctgctttttgtgtttctttcctcattctttaactcttacaactagtccttcattactgttggaactgcacgtttattgtagtattttgttttgctgattttctcagtatttactcagcacctacagggggccagagatcattctaggtactagagagacagccttcagagaaatggtcccagaagttccagggagctgggctggacagtgctgggcaccttcctttcaaaggaaaaggtgagggctgcacagggtgagggctggggcagactgcaataagcaaagcagtgcctgccctttgggagcccattttcttgtaggggagacagagcagacaaaatcaatggagacagaatttcatgtcaggtggtactaagtgccatgaagaaaaatactgcagagctggaagacagctccacggagagcaaccttccatgagttggtcagcagagcttcacacaggaggtgactgggtggagcatctgtcatgcccactagactgtgagctgtggttaaggaatgcctgtgtacgttcccttcattaccttacaaatctccagcaccaaagtgaatgcttagcacacaacaggataaatgggcagatgaaacgacattgccctcaaggatcctggtgaccatgctgtaaccacccaggggttacaaagaaagacctgctgtacaaagaaagaccaaagcattggagtaagaaagagtttaatagacacgaggctggccataccacttgggagacagagttagtactcaaatcaatcgcatccaaagctcctaggttatgcgtttttttcaaaggcagtttgggtgaaggggtgggggtggctaggcttgctgctcattggttggggcagagatgaaatcatagagagtcaaggctgtcctcttaagctgagttgctccctggtgggggccacaggagctatcaggtccaggtggagctatgggtttcagacatgcaaaaaacctgaaaagatatctcaaagggccaatctgcaatagtggtgttatctgcaggaatggctggcaacctatgtatacactttagcagaattcagattcttcttctccagcctgacggcctttcaatagcctcacaaggcagttgagtttcggagaagggctattatcatttaaactataacctaaatgtcttctgaagttagctcagcccaaaagcccaggagtagttaaggaaaaggcaagatagtgaggtggattagatcagatctctttcactgccataatcttctcattgttgtcatttttgcaaaggcagtttcaatggcacagggcaccaggcagactggaagagccccagaggcagagggtagcctcccagaagctgacccaagcaaccatcccatgaggggctgtgtgtacatatgaggcaggaaccgaggcttgctttctccacctctcctaacactggacctggcaactccaccctctgggccccacattatctcatatgtgactggcatatggcacagtccttgctgtggtcgaatctagccaagtctccaagagataaccaggtgcaaatgagcaaggttacttcttggtttttatttatttattttgattattattattattattattttttgagatggagtcttgctctgtcacccaggctggagtgcagtggtgtgatctcggctcactgcaacctccacctcctaggttccagtgattctcctgcctcagcctcccgagtagctgggactataggcgcccgccaccacgctcggctaattttctgtatttttagtagagatggggtttcaccgtgttagccaggatggtctcaatctcctgacctcatgatccacccacttcggcctcccaaagtgctaggattataggcgtgagccactgcgcccagccaacttcttggcttttagatcacatttaacaaacgacttcccccaggccacccttctctgctcaccaccctctcacaatggcctggagttcactctcttagccagtggctctgtctgactcaagaaaatgccttaatcctacctggggtgaccccagagtccatgacagttaacagccctttacccttccacggcactcatctttctttccaacgtgtcactcatatacagtgttgtcactcatctaccaagtggaggttaatgacctttaaaaacccgtgcattacatacaatagaacattattcaaccttaaaaaggaaggaaattctgaaacatgctacaacatggatgaaccttgtgaaaggaaacggatcttgggcccccaaatcgttaaggaaaactcaagctggaaactgcttaagacaaacccgcctcccattctattcaaagtgacccctctgctcactgagatagatgcatcttttttttttttcttctttttttgagatggagtttcgctctgttgccaggccagagtggagtggcccgatctcggctcactgcaacctccccctcctgggttcaagtgattctcctgtctcagcctcccgattagctgcgactacaggtgcgtgccaccacacccagctaatttttgtatttttagtagagacagggtttcaccatgttggccaggatggtctcaatcttttgaccttgtgatctgcctgcctcggcctcccaaagtgctgggattacaccgagcctggccattagaggcatatctgattgcctcctttggaaaggccaatcagaaactcagaaaaatgcaactgtttgtatctcacctatctgtgacctggaagctccccctggcttccagtctccctgcctttgcttcaagttgtcctgcctttccagactgaaccaatatacctcctacatctattgattggcgtctcatgtccccctaaaatgtataaaaccaaactgtgccctgaccaccttgggcacatgtcatcaggacttcctgaggctgtgtcacgggctcgtcctcaaccttggcaaaataaactttctaaattaactgagatctgtctcagattttctgggttcacaaccttgaggacattatgctaagtgaaatgagccagacacaaaagaacaaatactgtctgatccacttatgtgaggctcctagagtagtcaattcatagaggcagaaagtagaatgctggtttccagggggctgggaaggtgaaaatgaagttggtgtctcatggaggtagagtttcagtttgggaagataaaaaagttcgggagccagatagtgctgatggttgtaggcccattccagtgggatgtggcactccttttagaggacacttttggctcatgggcctcccttcagcctgacctaatgttcttagaaatctgctgtgattggcggctcttcttcccaggcctccttccttccccctctcctttcacgggtgtcagacctgcacggcagtctgccagctcctgctccctccccttggtccttctcaggtctttctcccagtcaatctcatctcatgcaggtctaatcccttcttggaatctgcttctcagaggacctgggctgataacatcaccacataggccaaaagagcaacatgcccaataaatgcactgcaaggcaacaagcacatttagaaccagcactatgcattcggaagcacagcaacaaacaccttcgaatttgtcagggcttacagttgacagcccatgttagtcattcaatacatgtgtaataagctcctgctgatggtgaacacatgcacagcttgcacttctgaggcaggcaggcaggccttctcatccacattctgcacacgagtaaaccgtaggaggttattctaggacacactttggttataatgaatcttaatgatgttaaaaagtaataggcaacatcatttagcatttacgacatgccaggtaccatttctatacttttttttttttttatgtgcgtgttgcttatttaaaaaaaatcctggccaggtgcagcggctcacgcctctaatactagcactttgagaggctgaggcaggcagatcacttgaggtcaggagctcaagaccagcctgggcaacatggcaagaccccgtgtctactaaaaataccaaattagctgggagtggcggcgatgcctgtaatcccagctacttgggtggctgaggttgcagtgagccgagatcgtgccgctgcactccagcctgagctgggcaacagagcgagaccctatctaaaaaaaaaaaaaaaatccttaaacagccccatattttagggaatgacgaggagccatgagcagaggtgtgcactgagagtcacttcgtgcctcgtgttctataggagctgacccagaggaggaaatgggggggttacagcatacctggccctccaggctcaccttgcaggaggagagcctgcagctgagaagctccatggtaggatggattacctttaaagtttcctggggccatctctagttacacagcagggacaagacaggacaatgggtgataaagtgcacaggctcagattcctaataaaaaaaagactgtgcggtaatgtgctcatcagccacgctgaggccaactgcaattgaggatttataagaaaaaacgatgtgtgatttacaaagaaatgatttttatcttttacatgtcaaacgatcaaggaaaatgcaacgtctcacatcatgctgatttcaaaaataatgcaacaaaccagtgatcggcaaaagaaatggagatggtgttaaagacttggggtggggaaggaagggcaaggcacagaggctgccctccctcttctctccaagaggggagcctctttccaccaccaaccctccttttcctgcagagggtgtggctttcttccaactcaacctgtcacttctgctgcctcccttccatcattgaaacaagaaatccagacactcctcattcttctaacctggtgatatccctggggctctccctccttcccagagtcctttccaggcctggacaacaggagaggctggcccaacaatcctctgctacaggactaatcttcaggagggctgagcaatgccctccaccccaggaagggcagtctttggggttcccatcttcacgctacaattgtgccttcctcttcatacctgagcactctgtgccactgctggcacgtccaacctgttcaaggcctttgagactgtccagcccaccagtgactccaagtttagcacagtggcgcacatctgcaccctttatttatctcgatgttttatatgcataactccacttcctctaccaagtcactaaactactgggggttggggcccatgggcctgccttgggcatcttctatctctccgttaatccggaagccacatagtgagtgctcaggcccatgagcagaataactgaccctgcttaagaaaatgctgtctgtctcccacctggcaggaaggagtcagccaaggagagtgacagaaagagaaggtaagtgtggaggaggtataggcttcctgtaggcgtgttcctgttgcatcgctgcacacctgctacccagctgagggcctggctcaaacacagcagatgtgtgataaataagtgctgaacaaataaagaaatgaatgagtgaaatgaatagaaaggaggatccaaagattagagaagggagagaggaaagagagaaatgcacaggctgggcgcagtggctcacgcctgtaatcccagcactttgggaggccaaggtggatggatcacctgaggtcaggagttcaagaccagcctggccaacatggtgaaaccctgtctctactaaaaaaatacaaaaattagctgggcatggtggcgagtgcctgtaatcccagctactcgggaggctaaggcaggagaatcacttgaacttgggaggtggaggttgcagtgagccgagatcatgccactgcactctatcttgggcgacaagagtgaaactccgtctcaaaaaagaaaaaagaaagaaagaaagaaaaagaaatgcacagatattctttgatctggaagagttggttagacaggctatgccttgacacaaatgaattgtcctgaaattgacttccagagaggcatggtttagccacagcctggttcaccactctgaaatgtatcttctatagacaggggtgacatggtttggctgtgtccccacccaaatctcatcttgaattgtagttcccataattcccatgtgttgtgggagcgacctggtggaagataattgagtcatgggggtggcttcccccatccagttctcatggtagtgaataagtatcatgagagctgatggttttataaggggaaacccctttttcttggttctcattcttctccttactgtcaccctgtaagaagtgcctttcaccttctgccatgattgtgaggcctccccagccacatggaattgtgagtccattaaaccactttttctttatgaattacccagtctcaggtatgtctttatcagcagcttgaaaacagactaatacaggggagaccatcttacacacacacacacacacacacacacacacacacccagtatataaaggatatcagtgtcattgcagtgcttccaaaagcataggttggtatcaggctgactatagctcttgaccatttctatgaccattaaaatacaacataaataacttgatcttcactgacctgtagacctagaaaaaaatattcaggcttagccacagacaaggaggaacaggggctgaagcgcgaaacaccaaccatctgcagagttcctgaactggtgggagcagcctgtcccacagatgagcctggactgggaagcatctatgtttcctcttacaccaaagagcaagacatggcattaacgaagccagacgtgctaatgggggcaactttgaagcctaaagctgcttgggcttccaattaactgccctgggcctccgtgtctctctgtttgcaaaatggcactgaatcactcctgatttctccagataagtagctgtgcttacactggtgatgtggtccatggaaatgtacgtgaataatggtgtgctggtataatggacagctggaaccagaagcagggaggaaggcacggagcagacaggctcatggcccttgcagggactcaaggtgtgtctaatgggacagtgaccaccaaactctctatcttctggctgcactgatttatgtcttgctcctgagaaattaatggcttgggagggtttgtggcagctcaccttgcctccctagaagggtttggtgacaactttgggaagtaaatgcactagtttccaagcaaccaaataacaggtcttcagttacaaacccgcgcttcattttacaaaacagtagctccagagcagcatgtaattaaactggcgaaggcttcacctccctggaataacctgagcccaacaggaccctgctaacaccactgttcaccaaataaaggtaaacagactcgtctgaagtcatgcctggagggggactctgatcttgcattaattgggcatgtcagttggccttaagaattcaatcagccgggcagtgacccaatctactgctgacaaatgggccccatttgctattcaaaaaattaaaaaacttatttgaagaggaaatagtggcttctagttagagcacctctcatctgccgggatctagctacatacatttgccatttaggctagattgctttactcttctttctaagtcaaggtcaaggatacatcccctttagtctaggatgacttggagcgcagagaataccagctccttattcccttctccttggcttcatcttctgattcatgcctgtctaactttcaggcacccattgtcaagggagtaatggtgtctggctacaaagaaaaaaaaaaaataagctcgtggcacccacttcaccagcagaaactctctgatttggagggctggctaatattgtgagcacccattcccccaacacctggcccttttctttgttttgctcgctttcagcagccccatttctggccccaagacctcccactgtgacactcagctaacgtatcaccttcttctctataacagcgtctgtggtcccaagcctagagcaccactgaggacccccttgcagcccagtttccaggctgctgaggtgccccactggccactgtcctggggtccaaccttcaggctggcagctgcatcagcatcatctgtgaccctcctcgaaacacacacctggattcagagaaacacaatagggacagggatgttgtattatttataacaagtagggcgggttgattctagcactgcctcctggaggcactggggagtcaggtgcagggcacaactagacaaggtgactgggctgcaaggtagagagtagaaagccgagctaacaaatggtgcaactcagtgagaagatctacatgctctcctaaaggactgcatgctgcgagacaatcttgggggcaacgtagcaatcagattattcaggagcagctgcagaaagccaggctacaaggcactagctaatttccatgggtgactctcaagcttcaagacacaagaatcacccagggctatgctcaaggccagcctctgccataaggcatgtttcctgctctacctggaaggaccaagcagattcccttctctggggtccagcgattgaagaacctaccacagagctgggctggaaattagggataagattttagctcttactcttctgctgctgagaacttggccccggccggcttcgtatctgcacgtatttctgaactattgcagatactcacacagaactcctccactggctcttgttcaggtccctctacagctctgagttatttctgaaaatctcttttccaaacagatcccatagagcctgccacatgttccctctccctggatcaggctggtccaggaagaattggggaatacagatgggcagaccccctgcttgggggagatgcaattacaaacagcaggcctgagactctgctttcaagtgccagatggcggattggaggcgccaccccagaagtctgctctgtgcccactccagacagatgtttagattctgcagggactcacaggtcgttgcctccattctttccccatcccatgacggcactcaatgcttcccaagtgtaaaccatccaggatcatgcagggcaagcactgaacaaaaccagaagacagcatttaaagttcttacaaacaatttgttactctcctaataaattgttttgccaaatattctatacactttccagtattggccttgaattttttgcaatgcttgactttatattattatacttatctgtgttattttagttttgcttttactgaaatctgtatcaaaatgttgaaatacaaattattctctatatcaaaataattaatttgtcttttaaaattgctttcgtttcatattgactattttgtttttaattatgtttgtttataaataaaatactttgcatggaaaaaaaaaaaaaaaaaaacagaagacaggctgttggtaatccagctgctagacagaggaagagagagactagcgcttactgggacatttctagcggcattatatatatacccgtggtctggtctgatttcatcctcacaacagcattccaaggatcttatccactccactttacaggtagaaaaatagtggtttggacagctgaagtcacctgccaaaagtagcagctggtccacagtaaatcgaatccccacccctcaccaagtcccctcctgccttaaccggagcagtcactgggggccctagctttgaagctgactttcgcagttcatggctaaatgacctctctcaacttcacttttttcatctcataagagggggccatatgatctgcctaccttcctggggggccgtgaggattggctgaggtcaagggtgggcctgcttcgtaaactgcactgttatcattgggatctgggacggagcctgaataaacgtattcacactcgggctttagtgtttaataagacttaaaacaacaataacaaatccctatcgaactatgtgcattttaagaggggacaaagctctaaaccaaaaaaagggcattatgatcatagcttcaggtctcatttagcctgccaggtcaaaggggactggggcaggaagggagttacctatttaataggaactcttctcagaaaattgtaaatcatgccagggaatagtatactgggttgaccagtatccccccaaaatccatgtctactcaaacctcagaacatgaccttatttggaaataaggtctttacagatgtaaacagtcaagatgaggtcatactggattagggtgggtccccaatccaatgacgagtgtccctataaaaaacgaaaaccgaaacccagagacatacagatacagaggggagaagtacatgtgaagatggaggtggcatgggaacgatgcatctacaagctaagttacaccaagaattattggtaactctaggaaactaggagaggccaagaaaggtcttctctagagccttcaggagaagcatggccctgtggacaccctgacttcaggcttctagattattccagaactgtgagagaatacatttctgttgtgtttaagtcactgagtttgtggtactttgttatggcagccccaggaaatgaataaacatagtaatggaagattctgagacaggcactatgctttacgtacactgtgtgtatgtatgtatgtatgtatatatgtatgtatgtatgtatgtatgtatgtacgtacatacttacttacttatttgagacagagccttgctctgtcatccgggctggagtgcagtggtgcgatgtcggctcactgcaacctccacctcccaggctcaagtgattcttctgcctcagcctcctgaatagctgggattacaggtgcctgccaccaagcctggttaatttttgtatttttagtggagatggggtttcaccatgttggccacactggtcttgaactcctgacctcaggtaatccacccgcttcagcctcccaaagtgctgggattacaggcatgagccaccaggcctggcccattgtctcatttatcccatgggggaagcagtattagaaccatcatttcacagagaagaccacagaggctcagctccgcagaggcagcagcaggattcatgctctgatcaggaggccccggtctcagcccctggaccacactgccacgcaggactgcctctgccctctcctgttcggccggcacaatcaggggagccagctagtctaattcgtgtggctttttcctacagtgaagggttcacccttaagcactgatattttccttcattttcaaagaagttgttttcaaaggcaatactcattttcctgcttccttaatttaatttctgtattgatgactcagaagcatttcagaaacattaattactgtgtgacaacacaaaatgatgatggcctgagacatcttgagctaggaggggatgtcagggctttcattagagccaccaccagctgctctgtccacggtagtggcgtctctatggatgacatatggtcattgattttatgtctgattcactgtcatcacggcgtctgctttgctatctcttagttgtccctacgctgagcaagaccttttcccttccacattacatttggtttttctcccctaatctaataaaggttggggaagtagataaccaaatttcttagaattcggcagagactcagaataaacagtattctggactgttaaggagttcttttatggatccagtccatgtgctatagggcattgagttttctggtttctcttctcccctacatccctgtcagcccagctgcattcacaacacaagagcttttaccatcctgccctgatcctgccgaactgaagaacacccactttttggggcaaggaatacgttggatgaggctccagcacaagaaaaagattttcacttagtgtccacctgtgttttctccagttggcaggatggcctcattaagggcatttggggctggatgcggtggctcacgcctgtaatcccagtactttgggaagcggaagccagcagatcacttgaggtcaggagttcgagaccagcctggccaacatggtgaaaccccgtctctactaaaaatacaaaaacgagctggatgtggtggctgcttgggaggctgaggaaggagaatcacttgaacctgggaggcggaggttgcagtgagccgagattggaccattgcactgcagcccgggtgacagagtgagagtcagtctcaaaaaaataaaaataaaataaaataaaaaaataaagagcatttggagggggctggctttaggggacctcccagacatcctgggacatgagaggtgtaggataaatcctttcctggcttctgcttccccagcacaagcgctgttcacctgaccgtgctaacccatcgctctctttgttacagctgctagggcaagggaatgctaccaaaaacctccaccttcacccattcaacattttcatggcagcatctcaagttgaaggggaaattcacaccttctggtctctattctcacttagctcgcttctgctgcaacttgtgatccccggacttctcagctgcacctacatctgtggagaggaacatctgaatccacaactgcctttagactggggccaccaggcttgctcttagccctgcccttataagggcccctttcttggtctcttctggcaactcccttttcaatagggcaaggagtctgtggcacccatgaggaacccctatctgtaatccacacccccttctactctcaaagtcttggcaccagggattctttccccagtgactggaggcccacatataaggcctgcagggaactcataattgtgttggtcaagcattgaccatccccttggtcagtgtactcaaggatcaccaagtagccaacgcaaagatgaactaagcccttctttttctatttcaactcaggcagtctgtggactaagcatgctgggaagagctgattaagagttccaagtgggccagcactgcccagagaaagcagtgaggagaaactgagctagctgaagggcaagagctggatcaacaaggccttctctgaaaacacttcccaagggagagctggtgtaaacaccctggcctctcttcttggtttgggggctgattttcatgtctctgggctgatcataactacatggaggggaaatacatctttcctgaggggcccagaagcactcgtcaatgtcaatgttgatttcagagctgatagtcgggatgaaagaggcagtagtcaatgtgagggtattaattccacgtctactacgtgcaccgcacagtgctaagggccctgaagatggggggcgggtgggggcacaactgtgtgtctgctttgttatcttgaacttgctctgtgtcagagcaattccgggacttgacaagttcatcattccatgtagaccataactgctctttcgctttgctctccactctctattaggtcagcattcattttcttttctttaaaatatttcccaaatcatgccgggcgtggtggctcatgcctgttaatcccagcactttgggaggccagggcaggcagaacacctgaggtcaggagtttgagaccagcctgaccaacatggagaaaccccgtgtctactaaaaatacaaaattagctgggcgtggtggcaaacgtctgtaatcccagctacttgggcggctgaagcaggagaattgcttgaacccaggaggcggaggttgtggtgagctcagatcgcgccattgcattgcagcctgggcaacacgagtgtaattccatctcaaaaaaagaaataaataagtaattcccaaatcagcttatttctttacagtccacactcatcatctcagcctgagctctaatccccaaactgtctggcaccttcggtctctctcctctttcctgggcttcacttattttaccatcactaaagtgaacattttaaaataaagtcatatttataagttccatgagaaaacctgggaaactcaacaggtgtctctcagggtcacggtgccccatgaatccacgatcctctcaaactctcctcttctgctccattccttgcacgtcaagaaaaccagcttcagagaactcctcccagaactttcaggagagaatttattttactgaaacctgtccttcacttccacctctttggaaatgctttgacatttccatcattttgtcttattttgtttcttttggttttttttttttcttttttcttttttttgagacggagtctcgctctatcgcccaggctggagtgcaatggcgcgatctcggctcactgcaacctccacctcctgggttcacaccattctcctgcctcagcctcccgagtggctgggattacaggcacccgccaccatgcccagctaattttttgtatttttaatagagacgggatttcactgtgttaaccacgtcttggtctcctgacctcatgttctgctcaccttggtttcccaaagtgttgggattacaggcgtgagccactgtacccggtccttattttgtttctaatacaagctcgtgttggggtgaggaagggcagaggaatggctattactaacattcttgaaaaagagcagatgcaagacgctttaatttttaaataacagactctcggtacatttcatcctgagaaaatacttcactttccatccatcaccatccaaaaaaaaaaaaaaattctatttataaaaggactcctctgcactgtagtgggttgaactgtacctccctgcttcctgcctctctctatatatacatatacatacatatattcaagtcccaatcccctgtacctgtgaatatgaccttgtttggaaaagggcgcctggcagatataattaaggtaaggatcttgaggtgagatcatcctgcatcaggatggaccttaaatccaatgataagtccttctaagaggaaaagaaggggaagcagacatagagacacccagaggagaagacaatctcaggacagaggcagagactggagtgatgcagctatgagccaagaacaccaagacttgctgcacccccagaagctgggagggggcatggaaaggattctccctccactgagagtctccagaaggaaccaaccctgcaggcagcttgctccggggtctttcacctccagaactgtgagacaatgcatctctgttgttttaagccacccagtttgcagtactgtgttacaggagctgcgggaaactgattcactagccaagtcccttggcacacactttctagggacagactctgaagtttgagatcagcctggctaacagggcaaaatcctgtctctactgaaaatacaaaaattagccaggtgtggtggcgtacagttataatcccggttacttgggaggctgaggctggagaactgtttgaactgggagatggaggttgtaatgagctgaggttgcatcacttcactccagcctgggcgacacagcaagaccccatctcaaaaaaaaaaaaaaaaaaaaaaaaaaaagcaggcccagcacagtggcttatgcctgtaatctcagcactttgggaggccaaggcgggtggatcacctgaggtcaggagtttgagaccagcctggcgaacatggcaaaaaccccttctctactaaacatacaaaaattagccagacggggtggtgcccacttgcaatgctagctactcgggaggctgaggcaagagactcacttgaacccgggaggcggagattgcggtgagctgagatcatgccactgcactccagcctggatgacagcgcaagactctgtctcaacaaaaaaaaaaaaaaaaaagaaaaaagaaaagaaaagaaagcagattttcaccagaaagcagacgattctcaccagaaagcagatgattctcaccagaaagcagattctcaccagaaagcagatgattctcaccagaaagcagattctcaccagaaagcagatgattctcaccagaaagcagattctcaccagacactgaatctgaatctgctggcaccttgaccttggagtttccagcctctagaactgtgagaaataaatgtctattgtctagagccacccagtgtatggcactttgttatagaagctgtaacagactgagacaaccaggcagggagcagagtcagggctgtgctggaaaaggcctcccatggctgtgatcacacacgccccttcctatcaccagccaggacctcccttctgagccctaaggccttcatactcatggaaattgagattacagcaaataatgcaggttcaaagtctgaacatgctgagtttggagcctgtagaacattcagatgaatctacctcagccagatggctggagggcagcaaacgaaatgacccagaacagaggagagaagcttgaatcacagctattgatctggaagttatcagcgtatggatggtgtgaagccgtgggggcagggaagaatgcccaggatgagaaaacaagtccagaggaaaaccatagatcagatctacatcagcttctaaacgcaggcaggagtctgacttgcaaaggtgagggaacgggaatagtcagagttaacaggcgcccacgtcacaatggatggattgaagaattaagaggaactgagaaagctgacacttccaaggagctggggggtctccatgccccctagcacaccctcagccaggaattttcaggagccagggcagccagcccccacccagggcatggctgtcccatggtcacagggtagggtgaaaagtagaagcagatgggaaagggaactggaggatgtgggggtaactgtgggtaggggtacaagcaaagaaagtatgaatgaagccttgaaaggacttggaaaggcctggtgtggtgcctcacgcctgtaatcccagcactttgggaggccgagacaggaagatcacttgaggtcaggagttcgagaccagcctggccaacacggtgaaaccctgtctctactaaaaatacaaaaattagctgggcatggtggcgcatgcctgtaatcccagttactccagagcctgaagcaggagtcttgcttgaacccgggaggcataggttgccgtgagcagagatggcaccacgatacgccagcctgggcaagagagagagactctgtctctaaaacaaaacaaaacaaaaaggttggggggtgcgtggggctggaagataacacagagcaaagatgtctaagaagacagggggtttgacaccagaatgtcaacgtagtgcagcattactgcagagagcattttctagggcctcaaactgctttggaaaactttggtgatatagttcggatatttgaccctgctcaaatatcatgttgaattgtaatgaccgatgctggaggtggggcctggcgggaggtgtctggatcctgggggtggatccctaatgggttggtgctgtggtgacagtgagttctcacgagagctggttgtttaaaagtgtgtagaacctcccctcccctctttctcgctcttgcttttgccatgtgatatgcctgctcccccttcaccttctgccatgattataagcttcctgagaccccccagaagctgagcagatatcagcaccatgcttcctgtaaagcctgcagaactgtgggccaattaaacctcttttttctttcttcttttttttttttttttttagatggaatctcgctctgtcgcccaggctggagtgcagtggtgcaatcttggctcactgcaacctccacctcccaggttcaagcgattctcctgcctcagtctcccaagtagctgggattacaggtacgcaggcatgcgcccccatgcttggctaatttttgtatttttagtagagatggagtttcaccatattggtcaggctggtcttgaactcctgacctcatgatccgcccacctcagcctcccaaagtgctgggattacaggcctaaacctcttttattcataaattacccagtctcaggtatttctttatagcaatgcaagaacagcctgatacatttggagatgaaaagaagcaaggatataggatgagggcttagaagggaaattaccatcaaggaggttttctctcctctctcatttcttcctcttccttctctcccaatctctctctcctccatggctagatgtttgtaggctgaagggaagaacccagagaaagagtcgggagaatttcaaagagaaagagagagagggaagaagatattgaggaaaggtggtgagggagctcaggagcacgtgaagacattagtcctgcagtatttggctcctccatctccgaaggggagagagggctgaaagatggttcatgatgtcacttgagctcaaaggtagagggcggagagtggagatgcttccaccagatgccctcaaagctttcagagaagccagggcacaattatcagagaggacgtaggaagggaaggtggaagggctttagtggtggcttcaaatggccaccaccgggagggtggaaaagagctaaggagaaacaattacagaaatgctggatacatcgttttctttattccatgtgtttttctcatcctgcccattggatttgcagagcttgaagagtaagttaagtatgtatctcaatcctcctggtctttcttgtcactcagagatgctaaatgcatttcacatacaggtatgcaaaaatacctcagaccaggaaaatatgttagcttggctagaaatgatcgtttatgcttaaaaaaaattaaatttgattggccaagcccacccttcaggctgctgagtattcattttcttcaccttgacagatgagattccctccccgacatctctggatcacaatgggccaaattatcagaaaccgacagggaggctagtgacacctttatagggtagcaagcatatgctaaggccttatggcataaccttgggttttagcaattgactgcatgggaaaccaggagtcagggcctgggcacccagctggaatctgatggaaacatcacccttcccatccacaaacatatggaaaacttctgtgaagaatttaagtgtgccagaatagttgatggaaagttctattcttagttaatactgtaactacagatatcttcgatgctggcacttccagacaattaacccacagcctatgccaacaaaattttacacttatcttcctgtcttactgtaaacaacccaatttcaaaggcaaatgtgctatataccctcccacatacatgtcttattttatacaccccatcttgcctttccatcaagataggaaagtagtcctagataccaaaataaaccccccttgccatgcccccaaatgttcagcttgttacaaaagcagaagatatctggatggctgatggatcccggggtgtttttcaggactgaaggacactcaggctattcctcaatgacagggagttcacacagcagcttctagctctgtcttagacttcttgcttctgtatgggcaggaagtgggacgcacatctagatgggtaatgagattaagggattcttgtactgtcctgggggcagtgatatgtgagagatgctgaggactggggtcctagaggcagactctaggcagagaggcaatcccatatctatttttcttgttttttttgagatggagtttcactttttcacccgggctgaagtgcaatggcgcaatcttggctcattgcaaactctgcctcctgggttcaagtgattctcctgcctcagcctcccaggtagctgggattacaggcacccgctgccacgcccagctaatttttgtatttttagtagagacggggtttcaccatgttggtcaggctggtcttgaactcctgatctcaggtgatctgccctcctcagcctcccaaagtgctggcattacaggtgtgagccaccaagcctggccgcaatcccttatctttaagatgcagtgcagcagacctggtatcagcttatgcggatgaatgcatcttaagaggctctgaaatagtatgccaccagtctttaccatttgtcactttgactgctataacccatggcttttttttttttttttttttttgaggcagagtctcgctctgatgcctaggctggatggcagtggcgcaatctcggctcactgcaagctccacctcccgggttcacgccattctcctgcctcagcctcccgagtagctgggactacaggcgcctgccaccacgcccggctaatttttcgtatttttagtaaagacagggtttcaccgtgttagccaagattgtctcgatctcctgacctcatgatccgcctgccttggcctcccaaagtgctgggattacaggcgtgagccacccgcccggccaacccatggctttcaagggaattttactctcttaaattactggggttctacagttgttcctctctctcttcaactttttctttctaactattcagtctatcatatactcagccaacaaatgtctgtggaatcttggaggtaaacatcatttttaaagtagcaaaaaccaagtacacagaaaatctgacattgtctagctaaactcacctttgtagccacatttctgctgaccccaaagcctcattctgatacattctgtttcctcctgggatgcacattcaccccagctgactctccccctccttccctgggctcccttactgggcgcatccagttattttgagctctcatagcaccgtggccctctctgttgtaggtagatatatcagggttgaagatttgcatttatttgtacaattctttcatgaatgtccttctcctccctggactgtaaatccccaagaaggcagggtcaacatgttttattaaccactgaatcctcaacacctcaagtaggcacagttcaagtaaacttttatttattaatcattgcttcccagcatttaataagtcaggtagcctctaatttcatcccctgggtcctaggccaatcctttccccactggttaggcccaggtatttactccatacatcctggacccctcgaccagaaatttcttcatctggcctctctgctatgcatccatgctggatccagctctcctaacagccttctgacactgcctgtcccagctgggttcaacatttccccttgtttccatgcattattagttttctctgatgatctttctcatatgagaatgacatgacattagcatctagagggtccctgaagattaagctgtgtttaaccatttcttagagaagagggcaacaaaggtcaaggaagtcgaccaatgtcacacgaccaggcagcagtcccaggctgtactttccttcaattttccaactgtctttgctgtactgcttcctcaaaacccaccttttggttaggcatgatcaagaacttgtctccagaaaagggagtataagaataatacacacataattttgggaggcaggagggcccctcgttacaatggccaaacaccggggctccacccaaaaactgatggagatgacatgagccaatggtatacatttaagaggtgatgctctcccaactaaacctaagtcctggacaatactagaggcaggggccccaaccccaaaggctgggatcagatgctgtgtattaagactggtcagtggagagtatgaggcatggatggagtaaaaggaggtgactgtcagaaaccatgcaactgaagcgtgaccacaggtgacatgtactgtggcaaggccagtgatttcattatagcatgttttcttttgtctgcatgaatgttatgttatgaccctcatttgagcatcagattcttagaggccttcatttttctcccagttaccagagaggacaaaggctttttttttttttgagatggagtctcattccatcgccagattggaatgcagtggcgcaatctcagctcactgcaacctctgcctcccgggtccaagcgattctcctgcgtcagcctccagagcagctgagactacacgcgcacgccaccatgtccggctaatttctgtgtttttagcagaggcggggtttcaacacgttggccaggctggtctcaaactcctgacctcgtgatccgcccgcctaggcctcccaaaggctttgactgcagtgtaatatttaccctgtggccaaacaatctcgatatatttgttaacttagcacatgcactgtgacgtgctatcatggagaagaacaatggaggccacctcaaaattcaagtcaaagaagtacttgttagggcaaagggcacacgaaatgaagaatggttttgtaattggctgtgaaagcaggtaaactgtcgcccaggtaagaaccatccctgggaacaggcctataactcggaagataatagccacagctctgattccacccttcagttcacttcagcaaacacttattggtcacccactgtgcagggcaggctgatatttggaaacatagaacaacaacctgattaaaggccacacttcctctgaagcctctgaattagttataagaaagaaccttttcattatgagggttctttattatatagaacctcgttccctggggcggatgaaatccaggcatcaatatccaggccgagagtcaggccttactgaagataggagaaagatctgtgggtacgtatgggtgtcctgccatctgaatgaataattcaggaacatggcccaatttcaccttccatgtctggtctggcaaacgtggagatgcttgggcagggaatttaactgggtttttctgacttctcgtggagtgccaaagattgagctgagggaaatcagggatgccagaatgctatgaaagctcaaatccactcaatcctgcaggattcaaagacatgaagtagcagcactgtatgcaagggaggctacttatctgctgccacattataggggagctgaggataacaagccgggtgggcagattatccatttatttttgtctttcgaaagactagcatagggggcatcatttagtgttcaatttcctgtgtcctcaggagagcacactggtacacacccccagccaggctggggggtcatcccagggggtttctggttgtgagaaagaatccatcctggttgcccacaaacaaacatgtgaaatacaaaccatgtgacctggataaacagaacatggtgaggaagtaggcagtgctcatctgaacaacaaaaccgcacccttctggaatacaaagacaccagatggtggttttctctggccaggatattcttcacaccatggacagacctgaagcgctgcttctccaaggaatgagaagataagagaatccatctttcaaagaaaacaatgaatttctctctctctctctcttttttttttttgagacagagccttgctttgtcgcccaggctggagtgcagtggtacgatcatggctcactgcaacctctgcctcctgggttcaagcgattctcctgcctcagcctcctgagtagctgggattacaggcatgtgccaccacacccagctaatttttgtattttttagtagagatggggtctcaccacgttggccaggctggtctcaaactcttgacctcaagtgatccgcctgcctcggcctcccaaagtgctgggattacaggtgtaagccaccacacccagccaaaaacaatgaatttcttgaatttgcatcacatttacatgtacagttagtgggaccctgagcagaaggaagaaggaaagcttcaaggcaaatggtgaggccaatccatgtagcaacttagccacgttgaagacaaatccccagctccctcacctgcagatatttacacgaatccagtggttctcaaagtggaggcctcagatcagcagcatcggcattgcctagagacttagaaatactaattctcaggtcccatttcagacctactaaattagacattctcagggtgggacacagcaaagttctccaggtgattctgatgcatgttaagtttgagaaccggctgggcacagtggctcatgcctggattcccaacacttcgggaggccgaggtgggcagattgcttgaggttgggagtttgagaccagcctggccaacatggtaaaaccctgtctctacaaaaatacaaaaattagccgagcgtggtggtgcacaccatgtcccagctactcaggaggctgaggcaggagaatcgcttgaacctgggaggcagagattgcagtgagctgagatagtgtcactgcactccagactgggtgacagaaagaaactctgtctcaaaacaaacaaacaaaggaaaaagtttgacagccactgcactaagacaaaaatagcaaattgcaatcacaaatacttccacagtgcttcctgtgtgtaggcactgttttaagtctttatagacattatttcattcaatgctcatggcaaacctgtgataaaggtactgatatagtgtggctctgtgtccccacccaaatctcatcttgaattgtaatccccatgtgttgggggagggagctcgtgagaggtgattagatcatggagacagtccccccatgctgttctcatgatagcaagtgagttctcacaagatctgatggttttataaggggcttttcgcccttttgctcggcacttctctctcctgctgccatgcgaagaaggacatgttggcttccccttccaccatgattgtaagtttcctgaggcctccccaaccctgcagatctgtgagtcagttaaacctctttcctttataaattacccagtctcgggcagttctttatagtggcatgagaatggattaacacatgtagtatgataacttctcatttctcagagaagaaaatcgaggcacagagggttaggtcattttcacaagttgttctgaccccctttagtcactgcagtggtgagggagacatccctcaccttaaatagtatgaaaatagtgtgagacagctgaacatatgacaagcaatgctgcacagactagtgacataactcagaagaggagaacatcgcaggccatgtggggccactcaaaggttgcacacagtgaaccagaaggggctgtgcaaggcaggttctgtagtgacaagagggtgaggtgacccttagttcccgcaggaggatgtggctggcttgtttgaagaattctgctggcaggcagtgaggtagaacccagaaagttgaggactgggctgggtgcagttggtctggttgatgtggaactacctaggtggggagcctttcctactgggtgggaagaaatctagccagagccagggaactcgcagctaagtctttgaggttttgtgaggctccaaggtgtcaaggaagcacatgaaatttcaggccttagaaagtatgagagaggaggtgatagagctagcatttgaacccaagctcctgtgctccagagtccacgctctagttttaaatcacagttctatcctgtctcccactgtctttaatcaaggcacactgcacacctctgtaagaactgccatgatccctcctgggtcaatatgcaggccaggtcgcggaggctgtgggaggttaaggtcaggggtcttcccccactgacttaaatgctcctttatatgggggttgcatctccttcaccagctcctccacacaccccactggaaattaataaggacataaacactgcccattgtgcgcagcatgcacaaacacattcattcactagcatatggcactgactctttttgcagagactatgttaggaccagacacacaaagataacatcaaaacaaggctcaggatgctccctactgccggcggggtgggggcgagggacaaaaatacaaacagagcatttcgggcaaattacaaaaggctttatattcattcccaaggtgtttggactgcatcctggaggctctggtcagtcaacagaggcctgtaagtcagggagtgaggagcagatttgccattttaggaagataattctgggggatggtgtgggaaaagctagaatgaggatgggcttatggcaaagcaccagacaaaggctattgtacaccctgagacagagaagcaggatgatcaaagaagagaggcagggtcacagattcccagggtgccatgcaacaagggtgacagacaggttttggctggcacatcttaagtcctagagctgagaaagcattctccagttagccacagaccccacccctccctactgtcttttattagctgacttgctgtgtttacatgaattgcctggtaccctaaggtgtttatgtttgaaagggagagattttctttctttcatacaatgtataacatgtgatggcagattggattgcgtggaatagagaaatagacagggaggaaaaggactaagggtaccagatttctagcttttaagagggaaatgcttctttttttaatttttttttaaaaacacagagatggggtctcgctatgttacccaggctggtctcaaactcctggcctcaagcaatattcctgcctcagcctcccaaagtgttgggattacaggcgtgagctgccacacccagtctggaaaatgcctcttgatgtgcacatcgttctatctgaattaatggaatacagtgcccagaaaggaaatgaataacaatgatcaacaaattctgcttctctaagattaaggctaggggagtgtaccttggcagttgcagaacctgactcctgtatcctttctcccccttcacagcaaggctgggttacaaatgacacagctgataccacaccggccagtatacagagaagaacaaagagtcttcaggttgaaagaaagcttgagggacccatagtcctgcctctaactgtaataacagccttcaaaatctaggccattgttagcatcaggctctgcctgaggtttgtggcattctcctgagagaagctttacccatcctgagaaaatgagattttgcaccttggagctgatgggaacgcctgggaacagtcactgtacacagctcacaatgggtcccagcacctgctctcacctagaaaggaaattcagaagctcctgctcatcaccatcacacagtccatgagtacaaatcacccatcataagaaaggagcttgctggagaaaaggcagcaaagccttggagaatacagcagaggcaaccagcccccaccaagccagcgagcgcggtgaggactcacactgactccacaatccttctgttgggtcccagccaatcatttttctaattgagtgagaaaatctgataatattgttcccctgactgaagccttcgtttcttctcatcactctaaagatgaagtgcaaagtgcttatcatggtccccaaggccccggtgtcctgtcctctgcctatatccccagctgtgtccaagccactccctgctccctccttctctacactcaaactgtccagtcctcccttcttttcctgcatctcattagcaccttacttgtgcagggctttgtgtgtgctatgcccttagcctgggacactcgcctccctcttcccatctcttcacctggccaatttattctcttccttcaagtcccagggtgactttcatttcctccagcaagtgcctcctctctgcccctctgaattaattatcttttgctgtataacaaggtacccaacatttagcagctcaaaacaacacacattgactatctcacactgtttctgtgggtcagggatggggaaagaaaggcacaagacctgtcaacatccacgacattagcatccacactggatatgagggatgaatgccaccagaattctgagggcagaggacctccgactgtgaaagaagattctatccacagtcaagttatcagcccaaagtgaagttatgataacattttcaggtacgcagagtatcaaataatttatctccctcatgccctgtattaacaatctactgctgtataacatcttccctgcaaatttggtggctcataccaataatcctgtatggtctcagtctctgagactcagaatccaggaggggcttagctggatggccctggctcggggtctgtcatgaggcttcagtcatgacagtagcctgggctgttgtcatcagaaggcttgagtggggctgaaggatccacttccaagctcacctgtgcagctgctggcttggagtttcagtcccttggcatcataggtttgccttaaagacacagggctgctgataacatggcagctggcttcccacagagcaagacatgacagagaaagagagagagagagtgcaagagagcaagacagtgatagcacaacagagcaaccaagatggaagccacagagacttcacttgacctcaactctaaggtcgcacaccatcacttttgctttttcctatttgttagaagtgaaccactgagaagtctagcacacactggagaaggagaattaggctctattgctctatttcttgaagggatgatattaacagatttctggacatattattaaaaccacccatcctcccaacagaagagttcaaaattccctgtgaggtggctcagtggtcatagcacaccatgcctcggcttcttactacttgtcacagaggcaattaaccaattatgtgtgtaatctgcagggtactatcagtctctctttctaaatccaaggcttcaggaagacaaggactattataagctatatccctggtgaatagcacaccatttggtatgtaacaggggctcaagagatatttattggatgaataagcaaatgagcaaataacaaatgaaagagggaagaatactggggggagaagaaatagtatatagaaaatgactacaacaaagaggtcaaaattgcaagaatttttatacagtgcaatgctaagataatgaaatacaaattcagagcagcaggccaaccagcctccatttgctaggactgcagctcacatactctgagttatgaggatgaagccctgggctgagcctcaggcagcaggaaactccttagactggctcagcaggctgctggtaaaacagaaaacctattttccaacacacgagacagaagagccgggaagtcacatctcctttatcaagcgaggcttctctcatcgtcctcttggtagcgacaggcttcaaatccacacactcccatcaacagcacccagggaagccagccagtaggtttttcctggcttctgctggtggggtcactctatatgcatgagaaggagggctttttgctgcgctcctattcccaagaccactgctacagattcttggaaatacaccctccccgtggagctgggcttccaggatcaaccacacagcagtctgagcttggcccctgcaggcacagcccagggcatgccaggtgaggggaagggcgagtggcaaaggagaacagaggggaaagggaagacagaatcatgagcagaaagcacgtttcaacaggcagctgaaaaaacgagacctaggccctggagggggcacgctgtgcccagagcaaaccacacacacacaaatccagcagcatcaccacctcaaattcgatgctgacttagcactgactaagtgcaattctcccacctcagcctcctgagtagctgggattacaggcacccaccaccacgcaggggtttcactgacatgctcgatactgtgaagtgctaagtatgcaagaagatgtgacaacccagccctgattttcaaagttacctgtgggcataacacacagacgaaatgatgaccgagaatgcaatacaaggtggcaagtgccaaagaagtgatgtgtacagcatgtgtcagaagggagctgtccctaggatggggccgtccctgaactttcctgagggagtcagagcttgaacttcgtgattcctgcaacagtgttgtagcttgaaagtgcctgtgtgtgaggagcgtgtatctcacacattgttccatgttcaatgtgcctaatacaaaacaagaatctacctacaaggggtttaccatcttgctgaggatgtaagacttgtgcacaaatacccgccatccaaagcagctcaagaggctatgctagtgttaataataataaataatagtagccatgtccctgaggaatgccaacccatctattctactgctggaggcaatacggagcctctgcagggctcagtgtccacatctgtgaaatggggttgtaggaacactgactaagataaggaatagagtaactactggcaggtaaaggcacttgagtgtctctccttcctcctccttccatcttccatgaagatgatcaggcaagaagaaggtagcattagatgagggctaatttaaaagatggggtactggcaaggaaaggctctatttgcttgggggaataatggaagacagggccaagtaaagggttgaggagggcgaattgactgtggtgcacacattctaataccagcagcctcatctaccaagccaggcacttgacatgcactacctcgtctaataccccactaactcacgggatgcacaccatcgtggcccggctctgcagaggatggagctgaagtttagggatatcaagtgtccaatctaagctcgcaggtggcacagccagaacctggacccagatcctttattccaatgtgctcataaccacttcctaatgctgcctctgggggatgcttcgtgctggggggcactgacccatgaggctgaaggggaagtctagaagaaggagtttgcatctagcatctggcagcctaggagtacatttcctatcacccagggaggctatgtcttgctcttggtttctctctcatgcactcatgggagtgacgagaaaaggagaaaggacagacgtgaccacagacttagtgagtgcagatgttggaaggagagggctggaatcatgctgagccttcccgtttgggcacgtggagatgggtgtatcactaggagaagtagggttactggtggggaggagaggaggcaacttcaggttatgtgtgttgagtgtgaaatgccccagtatattgaaatgtgtcttagtctgctcacgctgttataacaaagtaccacagacggaggggcttaaatgacagaaatgtgtagagcggttctggaggctggaagtctgagctcagtgtgccagcatggtcatgttcttggtgagtaatcttcaggcttgcaaagagccaccttccactgtgtcctcacatggtgaacagagagagagactgagctctggtctcttccacttctttctttctttttttttttttgagatggagcctcactctgttgcccagtctgaagtgcaatggcacgatctcagctctctgcaacctctgccttccaggttcatgcaattctccgacctcagcctcccgagtagctgggattacaggcacccaccaccatgcaggggtttcaccacgttggtcaggctggtctcgaaattctgacctcaggtgatccacccaccttggtctcccaaagtgctgggattacaggcatgaaccaccacacccagcctgtcccacttcttataagaacactaatctcaccaagggggccccaccctcctcacctcatctaaacctaatcacctcccaaaggccccttctccaaataccatcacactgggggctaaggcttcacaatatgaatgggtgagggacacaagcattcagtccagagcaaactgtcagcatctagctgggggaggaaaatcatgagtggcatctttgggaaggaaggcaggcccagatgtagagaattgagaagagagctgaaaatctgagagggcacaagaaggccaaagatagggagaagaagaggaccatgggttggtggaggaggggagaggagctggcaaggttttgacttgtgcacttggacgtgagtgtgtgtgtctgtgagtgtgcacatgtatggttgcatgcatgtctgttgcaggaagtcagggaccccaaacggagggaccagctggagctgtggcagaggaacataaattgtgaagatttcatgggcatttatcagttcccaaataatacttttataatttcttatgcctgtcttgtctttaatctcttaatcctgttatctttgtaagctgaggatgtatgtcacctcgggaccactgtgataattgtgttaactgtacaaattgattgtaaaacatgtctgtttgaacaatatgaaatcagggcaccttgaaaaagaacagaataacagcgatttttagggaacaagggaagacaaccataaggtctgactgcctgtggggtcgggcaaaaaaagccatatttttcttcttgcagagagcctataaacagacgtgcaagtagggaagatattgctaaattcttttcctagcaaggaatattaatattaataccctgggaaaggaatgcattcctggggggagatctataaatggccactctgggagtgtctgtcttatgcagttgagataaggactgagatacgccctggtctcctgcagtaccctcaggcttactagggtggggaaaaactgccctggtaaatttgtggtcagaccggttctctgctctcgaaccctgttttctgttgtttaagatgtttatcaagacaatatgtgcaccgctgaacacagacccttctcggtggttctgtttttgccctttgccctgtgatctttgttggacccttatcagtggttctgctttttgtcctttgaagcatgtgatctttgtacctactctctgttcttacaccccctccccttttgaaacccttaataaaaacttgccggtctgagactcaggcgggcatcacggtcctactgatatgtgatgtcacccccagcagcccagctgtaaaattcctctctttgtactgtctctctttgtttctcagccggccgacacttatggaaaatagaaagaacatatgttgaaatattaggggcaggttcccccaatacatgtctatgtgagagacagcacagacacatgcaagaggcaggagtgagaggacctccatccctgaggcaggaggaataccaaggatacttcaaagtggaagccataggtggagagagctccagaaatgcaaagaaggtccaaactacataaaatgctccacaaggaccaggaaacctacaataatttttttttttttttttttttttttgagatggagtcttgccctgtcgcccaggctggagtgcagtggtgcaatctcagctcactgcaacctctgcctcccaggttcaagcgattctcctgcctcagcttcctgagtagctgggattacaggcacacaccaccacgcccagctaatttttgtatttttagtagagacggggtttcgccacgttggccaggctggtcttgaactcctgacctcaggtgacccacccacctcagcctcccaaagtgctagattacagtcatgagccattgtgcctggctgacttagaagaattttaaagcagccaagagacttggcggctgggggtcactggacaccttcagtaaaaccattttctttaaatggcaggggactagaggttgtgggtaaactaaggagagaggcagagagcgatggctcaaaaggaagcagggtgttcgcaaatagagaattgagagggagaaaacagagtttggggaagggaagatgctccaagtcagttctattaatgaaatggactgcttagaatttagacagaatgaaaaaggtagaaaagtgaggtaccataattattagtatatttctatcatgtcattcaaatatgcttaaaactaatgtgccatgcaatggaatattaattggcaacaaaaagggatgaagtactgatacatgctacaacacaggtacgtcttgctaacactgggctaatttaaagaagccagacacaaaagcccacagacgacatgattttatttatacgaaatgtccagaagaggcagatctagagaaacagaaagtagattagtggctgcctagggcttgagagggaatggggttgggggatgctggctaaggggtgcaggatttgttttggaggcaatgaaatatgctttttccttttcttttgtttgagacggagtctcattctgtcatccatgctggagtgcagggccacaatcttggctcactgcaacctctgcctcctgggttcaagcaactctcctgcctcagcctcctgagtatctgggactataggcatgtgccatgacacctggctaacttttgtattttttgttttagtagagacagggtttcaccaggttggccaggctggtcttgaattcctgacctcaagtgatcctcccgcctcagcctcccaaatcgctgggatttcaggcatgagccactgcgcccagccgggcaatgaaatattcttaaattgactgtagtgatggctgcacaattttgaatatactaaaagccatggaattgcacattgtaaatggttgaactgtatggtatgtgaattaaatcaacaaagctgtctaaaaatttactatgtatattgtcttcaggatggcattttaaaaaagaaaaatttactatgtatatctatgagtaacaagggatcttttagggtgataaaagttctataattggattatggaaatatctgcacaactctataaatttactaaaaatcataaaatcgtacataaaaactggtagattttatggtatgtcagttatgcctcaataaagttgtttaaaacaataaaaaaactttaaaactttatgacacagacaaaacactctataatagggttgcagtacatttagactaaaacaactcaaaaatataccgagtcatctgtcaaacgagaataacagttccgtagaatcactgtgaagatggcacaaggtaagacattccctggcctacagaaggttcgatgcagcgcagctctgattaaggggattaagggaatgaatcccaccatctctgaatctggcttccctgtgtgatatctccggggtacggcaaagcctgggtaggatgtgcacccagacacgtttcttggcaatgaaatatcccacagcccaggaaggaggtgagggcagattgattccacttcttgtggcccaagagaaggcctgcaggtcccagggatgaactttgtcttgaaaatcatatgggtggccagacacggtagtacatgcctgtaatcctaacactttgggaggctgaggcaggtggatcccctgaggtcaggagtttgagaccagcctgaccagcgtggtgaaaacccgtctctactaaaaacacaaaaattagctgggcacggtggcgggcgcctgtaatcccagctacttgggaggctgaggcaggagaattccttgaatctaggaggcagaggttgcaatgagctgagatcacaccatcacattccagcctggaccacaagagtgaaactccatctcaaaaaaaaaaaaaaagaaaagaaaagaaaagaaaatcacatgggttaatttgagtggggaagggaagggagggaacgcaatactaagggaggcatgtgtatggggcgtggtggggaataggggctggaaaagccatttgtagttgctggacagtagagagccactcactgtaaaccagtaggtctttgtaggtgccctcgaggaagccaggagacaaaaagaggctgcccctatctgtcagctggttttatttccagagcccagggaatgtgtcaaaactatggaaagtccccatcgcacacgactgggagccaccttcaggctggaaacgtccatggagtccctctgcctgctggggacaagccagctagcctgtcctattggaccttcaagggcaagcatgcagccttgtgattcttggccctgttaaacccaccgtcctttctatcaaacaaaaacggaacgtcctgctttcttgtttgtagaatacaaagacgggatttggtttcccaaatagaagattaaatctcaatcctcagtgcgctgctttaaaccccatggatgcgcgcctctgaggcaactgggccccctcgcctcctgcccttgttgtgaatctccagtgcagccccatccctctggcgctgccaggaaatgcttactgactgctgggcccgtggtgctgccatagggccacacacttcatccagcctgtagccagccaggggcttggtaaatgaccccaaaggcagactctgccggctgtgtccctgtctctacataaaacaacgcacaaacccatacctttcccagaatctgcacgtggttcaaaggcatgaaatgccacacgcaggaggtacaaaggacctgcctgaggcccaaacaggttactctagggaaagtgggggaaggctgtgtggaccattgagctctatgtagttatagcatgcctcttccctcatggcgtgaaggatttaaagcccccaaagagaggctccttccagggttctcctttcaagcacttcaaaatagtcccactgagagatgactccgctccagccaggttctcagctcctggagggcaggtcacatttgctttctctgacttgcatctcacatgtggcacagagcagacccccttgatcagtattcggcagaataagggactagtctcccttcatcccctaggcctaattctccctggatggccttgaagagaagcaggtacatccaggtgagggcagaattcaggtattcttgcttccgggtcagatgctttcctattagccctcatccgtcatatcccactcttaccaactttccacacaagacaaactcttacacatgaataccctatgtttatgccagagctgttaaacctgtttctacgtttctttgtaaacactatcttttttgggtgggggcggggttggagtctagctctgtcgctcaggctggagtgcactggcgtgatctccgctcactgcaagctccgcctcctgggttcacgccattctcctgcctcagcctcccgagtagctgggactacaggcgcccgccaccacgtctggttaatttttttgtatttttagtagagacggggtttcaccatgttagccaggatgtaaacactatcttgatgcatttttattccaagtccccatttgaatgcaaagtcctaggaatctggaaccactgttatctccctggcatcccatagggagttctgcccagtggtcaatgtcctagaaagctcaggtagcacacagccagaggaggatagaaacccttgctgggagcacacatccctcttccctcccactccccacccaagtagagagtatgtggataatttagaatctaaagtcgagggttggatatgatctattacaaagatacctaagcaatttaactgtgcctgtaagattataaaaggaaaggttaaccatgcaagaagaccatgtgctttcaagcaacatacaagcatttgttgatgagtaaggcagagtggtatagtaagcggggcctcaaactgcagtcaagaaatccgtttctggtcctgtctctgccatgacctagctgtggcacctcagaccagtcatccagtttcttgatctgtaaagtgggcacattggggtaaactaaataatctcccggccacgcagtggctcacacctgtaatcccagtgctctgggaggccgaggcagcggatcacgaggtcaggggatcaagaccatcctggccaacatggtgaaaccccgtctctactaaaaatacaaaaatcagccaggcgtggtggcgtgcacctttaatcccattcgggaggctgaggcaggagaatcacttgaacccgggaggcgaaggttgcagtgagccgagatcatgccactgcactccagcctggtgacagagcaagactccatctcacaaataataataataataatctcccaagtccccttccatcactgaacatgactattctatgacacatggatgaaaaattgtaaggataaataaataccaggtctgttcttataccgccctcctgtgtgtgtaaatattttggtactatttaaagaggcatgtgggttggtgggggctctggatctctaccttcttttggtgacagcatcctgcttttccttgagaaaccccctacttccatcctatgtaatcctgatggaattgttgaacaagcctccagcctcccacctccaggcagaaggaatagtagctcaagcttgcctactctcgacaactgcccctgcttggaatgcatcccagggctctcgggaggctaagcatgagggagattgatgggtgaacttgggctgcaggagacaccacttgttcaatcagcagactttgcacttagcatgtggaactggccacctacagtgcccgatcttctgtggccagatgtgctgtcaaggcagatttatactcaggagtgcgggaggcctggtggcgctccttcccgccctggatcagtgagacacagcctccagtttctgcttccttccgtccatgggcttggatttgtatcttacctgatcaattcttgtcaggaatgtcagaccagctgtgaggtcctcctgagtgcaaacagtgacagccaggagatgtggctcagagttaatttttttttctttttctttttcttttttttttttctgagatggagtcttgctctgttacccaggctggagtgtagtggggcgatcctggctcactgcaacctccgcctcctgggttcaagcaattctcctgcctcagtctcctaagtatctgggactacaggcacctgccaccatgcccagctaatttttttttgtattatagtagagacaggattttgccaggttggccaggctggtcttgaactcctgacctcatgctatccacctgccttggcctcctaaaattactgggattacacgtgtgagccaccgcacctggtggcttacagttaatttgcaaccaacctgactttaaagctgggaaacgaagagagacctgttccagttataattagagatccttttggactagtgaaggcagaagggtgtttacaggatcttgttatcttctttcttggtttatcctggccgccccctcagccgttacttttcctagccaatcttcaactgcttcctaaggaagggtacaagtctgaaaacatctttattctatgaatcatcattgagtgaatgtgagtatagaaaattctaggtttaatattatttttcctcagaactttgaaagcttgaagcttgggaaattaaaagccttgtttattgctggggagacctttgaagcacttctgccaaactatttccccctttctggaagctctaacgatagcattctacaatttcatgctgatgtatcttggcaacggtcccttttttatatagtgggctggcacttagggggccttcccactcttgaaaattcaggtacttcagtttgggaaagtttttattgtatcacttttgcacttttttttgagactgagtccctctttgtcgcccagactggagtagagtggtgcgatcttggctcactgcaacctccgcctcccaagttcaagtgattctcccgcctcagcctcctgagtagctgggattacaggcgcccgtcaccatgccgggctaatttctgtatttttagtagagacggggttgtgccatgttggccaggctggactcgaactcctgacctcaggtgatctgcctgccttggcctcccaaagtgctgggattacaggcgtgagccaccgtgctcagcctcacttttgtgctttttaagctccattttctctttctttctggaatgctgacgagtcaccagtagatcctactggattcatattctcatttccttaccttcttttctcacattttgcatctacatgtcttttattctatttttaagagatttcctcaacttcatcttttcatccttctactgttttattctagctatcttgtttttgatttccaagagctccttcttaatctaattgtgccttttcattattgatagcatcctcttcttctccctctgaggatattcatcattttcattgttgcttttgttttatgtttccttgtgacctctgcattgtttctgttatctccaaattaatttttctgtctttatctttcataccgaaggcatgcctcaaaagtctaaggaattagagctatccagttgtggtataatacaaaacatattttgtctttgtgtctggtggcacagagcttcccaaactcctggaattaactaaggaataggagtgtctttgtttattcataatgagccccttttgttaacacccgagtttatgctaataaggtgactaacttgaggtaggcccctagatagtctcagggtgggctggtcacggtcaccagaaagaccaagtgattagaaggctagaattatcaaccccacccactgacctcctagaggggattcgaaggaggctggatattaagccgtctaaaaactcaacaagaagatatgatgagtttccaggttggtgaacacacggaggtgcttggaagggcagtgggcctggagaggaaatggaagctccatgcctctttccctataactgcccaatgcatctcttccatctggctgttcctgagttgtatccttttaggataaagtggtaattttgcaagtagatggttttcttgagttctgtgagccattctaggaaataactgaacccgacgagggggtcgtgggaacccctgatctacagccagatggtgagaagcccagctgacaacctagattggtgtttagcatctgaagtaagggatctgagcccttagcctgtgggatctgacacgatctccaggtggatactgtcagaattgagttaaattgtaaggcaccaaattggtgctctcagaaaactagagaattggttgttacaggaaaaaaaaaaaatacccacatctttgctggccataagttctgtgtgtgagtgttgggaaaacaggagtttctcttatcactggtcatatttaattgcaaagcattaagaaatggaccagaggctcatatgcatagaaggggcctgttgggtggggaactaccatctagggggattgggcctccagtcatctttttggtaggtggacctccaaatatcaatgttttgaaactgcctttgcaaagaatatgacaggaagagaagcttgacatggcagactccatcttggcttctagccctgcaggtgggctgccctcgctcattcttaggtgcaggcaaggaatttagtttatggtttaactttaaagcaaggatgataatagtccctccctaaaactgatccccttcctgttcagggactgaaactggctttgtaagactaagtgcagactacaagattaggattacgggaggggcctgaattctgctaaaatgtaggtatagctaaatgacagccagcaaatgtccactagcttgtttttctataatcccttgctgctcaggagtcgtgtggccagaggtcacaagatttgtgatttctgcaattgctcctatagataacactatacatcactattgtagaacctaagattggtcttttgagatgtttttcagacttttgcattctggcacctgactgaccccacctggatctgtgattcctaagcaatcctgtcctgtggctcccacccagagtcggactcagcacatgaggactcttccacacctctatgatttcatccccaaccaatcagcagcatgcattcccaagccccctgcccaacaaattatccataaaaatcctagcctttaacttctgagggaggcagatttgagtaataaactgtcttctctttccacttggctgtccttatgttaattaaactctttctctactgaaacaacattatctcagtggattggatttatctgtgctgtgggcaagaagaacatgttgggtggttacagtttggagattatttctctaagatcctgcagcagagtccagcagtcttttcctctcttccccggaggatataatcttggtttcactattcccaatttcggcttagatcatcttctttcttttctttctctctctctctctctctctctctctctttctttctgccctctcaggcccaccttctcctgggattcactttctccagatacctctcttggttcatttatctggataacaaatttttctcctgccgtggtacaggagcggcaattgttctgttatttggtgtgggatgagctctaaggattcctgatacagatcacaaccaaccatcctgtttgcgatcccatctctactccaagtttggagcctcaggatctcgacacttcctagggtttatgcaggacatttcagcttgcttcttcgtggcttcccttttgcaatcacctggactccatctttctctactctttgtccatttctgcatccatggttcaaatatctgaggacctctcatcactcatcacatcttggagtaacagtatggcattaaaaaggtatgtccaaaagagagagactcttactttcattttaacggtattttaggaagcagcagaaatgcatgtgttaaaatctgccacatttaaacaaggtctgcttaactatcccaagcctcagattttgtttgtttgtttgtttaattgaaaacgaagagtttgggcgtggtggctcacacctgtaatcccagcactttaggaggctgaggtgggcagatcacttgaggtcaggagtttgagaccagcctggccaacatgaagaaacctcgtctctactaaaaatacaaaaactagccaggcgtgggcacctataatcccagctacttgggaggctgaggcaggagaattgcttgaacccaggaggcagaagttgcaataagctgagattatgccactgcactccagcctgggtgaaagaatgagactctgtctcaaaaacaaaaacaaaaacaacaaaaaaaaaaaaaaagaaaagaaaatgaagaaaactctagtaataataatacttgaatactctcttaagaaaatatctttccccaattctcaaatagtacttactggtttacctattaaagcttaacacatgcttatgctatgacccaacaattctacccctaggtacatatacaagaaaaatgagtgtgtgttcatcaaaacacaaatacaaaacactcattgtggtttttctcctaatagcccaaactggaaacacccaagcatccattcacagaagaatggacaaatagtagcatataaatacaatagaatactgcatagtaaaaaacatgtaatcaactattgcaatgcacacagacgaacctcagagatgtcacattaagcaaaagaagctggctacagaacagaatgtgcagtatgattccatttaaatgatattccagagcaggtggaacctatctatggtaaaaagaattagaatactaattatctcttagaggaaattactgcttaggaagagctatcaggaatgcttctgagttgctagggtattttgtatcatgatctcaatagtggttatatgggatatacatatgtaaaaattcttttttttttttaagacaaagtctcactctgttgcccaggctggagtgcagtggcatgatcttggctcactacaatctccacctcccagtttcaagcgattctcctgcctcagcctcttgagtagctgggattataggtgcacaccactacatccggctaatttttgtatttttagtagaaaaagagtttcaccatgttggctgggctggtctcaaaccagcctggtcttgacctcaggtgatctgcctgccttggcctcccaaaatgctgggattacaggcgtgagccaccatgcctggcccgtaaaaattctttaagttgtatatttaagatttgttttactgtatatatgttaaaacttgatttgaataaaagcaaaaaaaaaaaaacattgtttagactgctataacaaaatacctgagcagcttacaaacaacaattgtttgtttctcacagttcttgaggctgggaagtccaaattcatggcaccagcagattcattgtctgggagggtgcattttctgagtgtcagactgccaacttcttcctgtatcctcacatggtagaaagggtcaggcaactctatggggcctctcttttaagggcactaatccagtctctagggccccaccattatgacctaattacctcctgacagccccacctcctaaccatcacattggaaactgggtattttgggggtacaaacattcaggccatggcaatcactgtttataattttaaagctttgtggaaaaatagttttccagggtaaaagttctacctaatcagaaatccacctggatctcagaagggagaggctgggcatctttgcctgtcagagatgcagtaactgagatgctgtatctaaaatgcatagcttagtctttcttctccctgttctactatcagtggtgtgctctttgaggagtcacactttctgtgagcttcaatttcctcttacaacaaagaggtgaactatattatctttcaggttcatccaaattctaaaattctttgtccacttgggaaaagtttgttggttttgttttttatttaacaaaaatattctctttcctccctttcaaccagacacatgatttctctgctcttaatcctcctactactgaccagatgataagggaaccacatcaccaatgtcttttatactcaactagcttagtgcaatgaatataacacatgctattagatgagaatgtaactttgccataaaaatagtgaatctaaagcaaagccttatatttataaagtgatgaaattgcatccacaataaaaaatcctatcagcaaagctgtgtaacaatacaaggctttggagagagttatttctaccaatgaacttagtgaatcactaaataaactgtctttttgtctcccccacaaaaacttggccttagtataaatgatattatattttctctggccagaaaaataagaaaaaataagatactattatgcttggagagaaagctgctccccaaggtcatgttagtgtaaccagagatcctttcggagggaagacaagcatctgggcagtcaacctgatgggctggcaaactttatccgttagtagattttctcccagggtcagctttaagaatcatcactgctgtatcctagacattttggtttctatttgaaatcagagcaacaataaaaattaaggtacatttgaatgatttagaatctagagtctagggttggatacaatgtataacaaagatgtctaggcaatttaattgcatcattcagattgcaaaagaaatggttagccacacaagaagataatgtgcctttaagcaacttaaaagtaattcttgatgagcaaggcagaatggaatagcaacggggcctcatatcacagtcaaaacatctgcttctggtcccacctctgctattacccagccttggacaagacatccagtttcttgatttgaaaagtgcacatactagggtaaactgaataatttccaaagtcgtctttttacggtgaactttaacattctatgatatatggatgaaaactacaatgacaaataaatagcaagttcgttcttgtaactccctcttgtgtataaatatctcgatgtcatttaagaaggcattgtgcttgggggggtttagttttcataagctcagcatccttactgcttcttttggtgatagcatcccgcttttctttgagaaattccctgcctccatcctacacagtccgatgaacaagctcctccccgccccttagtgttggcctctacaacctgacctggattctcccaatccgattttctcttccagaattgaaagttgagctgaatgacacaggggcagaaaatggttgttcgtgagtcattctgacgtcagctctttgaagagactgcccatagctcccgtctattattgcaggttttgggatgccttgctattggtcttccaaagactagcttttccttagattctctgagttactccttatacttttgaaaaacttcttcatatgctttagctggccagagatgacatctgttgctcacaaccaacaaaccctaacggatggagaactcttttctggtccccattgtcagattttaatttgtattttgaagtaataaaaccgaatttgtttaaagtgctctaaaaatttcgatatttttgtctaattaagacacccattttctctaattagaataagcagagctactgcacattctaaagcataatattaattttctgctaccttagactgtacttgattaacctggtaaaataccatggttctttatgaagctgagcctgaactaagggcaaatacattcatggatcagaccctgggactagttctatcctcctctataatcatggatgtcatcatcagaatgctgtggaactcttggcagcatccaatctaccaagtgttctccggagagaaaagcagaagttgatcactctgcctctcagccaaaagcccatcatagcactgccaggggcacttctgccaggaaagcaatgagctttttagcaggtggtacaaaagtacgccaggagctaagacttcaaatattaccctcaaaagagtaaaacgcctttagttaaggcaggatggggcagagggaggcggcagagaaggacctgcatattccactaatgaaggctagagtctacctccgtaagagtgcttttgtgaagcaacatttaaaacgtgacactgacagcgctactcactgatgggttaggaggccatgagaaccgctttcttgagagagctgagcaagatatataatgggacttatccggtctcagaactgttgctgagaaaaactgttgacattaccctctcattctacattctagaacaacacggcatgtctaatacagtagccacatgcggctttttacacttaaattaattaaacaagattacacaccatttcctcagtcatagcagccacctttcaagtactcaaaagccccaggggattcatggctaccatactggaccgtgcagatactgagtatttctatcactgcagaaagttctacaggacagtgttactctactgagaagtacctgaccctcttgcagaactggagaaggagtagttcctcccaaatggtgccctcggcccccagtggtcccatggaaggcggagagacaagaacgaccataccaagaacggccttggagagttgtcagagctcaccctgaggatggaggagttcctctatactcaggccaaatgagggccactgcaagagacatgcttgcagagtttggcatgctcctctggagaactgggctctgaacacattgtggaatagtcccgaggtgagaaggtgcctgagagaactccagtagccatcagaggagagggggatgccctggaagcagcctgcatttccagaggcaaagggccaaggtgacattttagaaggtgactaggtacaaacaagctataaaggttaacccgagagatcagcctgcaaggacaaactgattctaatagcatctgtgcagagaggatcacctggggctggggggaccccaagaggtcatccacaatgcatcctgcccatccctgtgtatatttccatgaagaggctctgaagagccctcacaattaggaccccatgagaacaatggtccacacttgagaatctgctacttcaaggacaccaacactaaattataactgtaacctttagggaaggccttttgtcactcaccacccaaacacaatccttcacttctttcttccttcaatcctaaggaattggcaaggcaagcagggtagggggtaaaaaactaaggaaggggcaaaccacccacatcttgtccactgcaggctgccaaggctaaagcaacccaggagttattggtggaaggaaagaatgctctactcaaggagatgctgaagttctattaagactggtccatcgggattgcatatgacaatgaatctgctcatcaatacctaaaacttacaggaaaatgtagctgtctatggaatcacccaggggaagggaagggagagccaacagaacaggttaggaagacattgatatgagaaaatcaagctgttatgatttcaccctacagactcggaaagctccagaaagaatgcaggagaggctgggcgtggtggctcatgcctgtaatcccagcactttgggaggccaaggcaggtggatcacgaggtcaggagttagagaccggcatgaccaatatggagaaaccctgtctctactaaaaatacaaaattagcaggtcatggtggcaggtgcctgtaatcccagctacttgggaggctgagacaggagaatcacttgaacccaggaggtggaggttgcagtgagccgagatcacaccactgcactccagcctgggcaacaagagcgaaactctgtctcaaaaaaaagatttatgtcctagggccaggtgtggtggctcacacctataatcccagcactttgggaggccaaggcaggcagatcacttgagatcaggagtttgagaccagtctggccaacatggcgaaaccctgcctctactaaaaatacaaaaattagccagatgtggtagtggccacctgcagttccagctacttgggagatgaggcaggagaatcgcttgaacctgggaggtggaggctgcagtgagccgagattgggccattgcactccagcctgagcaacagagtaaaactgtgtctcaaaaagtctgatgtccctaaaagtgttttgttgttgttgtacctgtgctggaatgcctgtctctagctttcctttatatgagaaaagataacattgtttcagatattctatacatgcagccaatcccttatcctaactcagaagccagaatccattgcggagagttgaacttggttttcaaagtcctatgtgcttcattctaaatcatctgtccttatttctgtaggctgaggaaagttcctgaaggtggttgcccagttgtagagtgtcctttcagctccatgactatattcttcagatgggacttgaacttaggaatccctacatgttggggagaacaggatgctgtaacagcaatgaacttccagacacagctttgatcattggtgaatcagagagttctgttgttgttgtttttctaatctctttgctgtttcttttgctctttcttcccaccctcattctcctgccagggaaaaaaaaaacatagccaggcaagagcacatccaattccctttcttaattagaagcgaaacatttaaaagctgtggcacaactgcttgacgaacatttgcaagttatctccaagcacaaagccaacacattaaggaaagcaacagggtcatagaacacgtcccaggctaacagagagggtgatccagatttgcagaggtgtctgtcaaccacggctggaggctcctaatcccctcactcagagctggtcatgcacagagaaaggctcatatgaaacacaacaaacccaagctctcccaggtgtccgtagcccagctacgaaatctgtcatcccaaactaacactccagagcacttaatgggttttaggggagcgttcaaataaataatcatttcctggtattggagattggatttcatacaccatagcccaggcccaagcttaatgggagagagataaagaacagagttctttttccaaaagtaaaatttacttctgatccattaatatgtatgcaaatagtttcttccagactctgtggtctgggaaataaaatagccagcttgatcataattattttcttacttccagggtgcttgatattagatgcagtaatggtttgctatggcaaatcctagggcctctttccctagaaagtgttaaataagaacaggttgtgtctcagtccatttgtgttgatataaaggaatacataccccaggctgagtaacttataaagaaaagagatttatttggccaatggttctgaagcctgtacaagaagcatggtgtcaacatgtgcttctgatgagggcctcgggaagcttccactcatggtggaaggcaaaggggaactggcatgtgcagaggtcaatggcaagagaggaagcatgagagacggaaggaaggaaggaagaaaagaagggagggagggagggaaggaaaagaagggggagggggaggaggaggaggaggaggtggtggtgtaaggtcttttcaacaaccaattcttgctggaactaagagtgagaacttgctcccaggagaatggcaccaaggcattcatgagggatccaccctcatgacccaagcacctcccaccaggccccatctccaacaatgaaacttcagtgagatttggcagagccaaaaaacccacatccaaaccacagcaggtacacccatgggaagcgctcaatggatgatggctatgacaacatcactaactcccaagacgaacaaagtatttcatctttacacagttctaattgtgaaaaatgtattccttagactgtgttagcatctatttccctttaccttccactcctgggtcctatttccagcctgggagtaaacataggataaacccaaactcttgtccccatggtggtctgtattattccattctcacgcagctaataaagacatatccaagactggctaatttatttaaaaaagaggtttaattgactcacagtttcacacagctggggaggcctcaggaaacttacaatcatggcagaaggtgaagcaaacacgtccttcttcatatggtgacaggagagagacatgccaagcaaagagggaaaagccccttataaaactatcagatatcatgagaactcacacactattatgagaacagcagcatgagggtaatcgcccccatgattcaattgtctcccaccaagtccttcccacgacacatgaggattatgggaactacaattcaagatgagatttgggtggggatacagccaaaccatatcaggggtcctttcaagacataaagcagtttatatcacctgtgtcttcttttgtccagcctgaaaggtccaatcatcttgacccgaaaggtcaagccactgctcccgtggcttagtttccagtccagcctgctgaggttcttgtctgaaagccccaggctgtggcagtctcttctatcttgtagctccttggacacctggagaggtatctggagggtgcattcctccaggtgtggacaagcacctgcagatgaagtagcttgttccgagaggaatgacttcacaaggatggcttagactcgcaggctacctcgcaccttgcaggtaggaggtaagcagtgactatttcttgaatcaatatatgactgaatgaaagattaagcctattgatttaaaacctatgttctttttcccacttctgaatatacttttatcatttctttggggggcctcatttctggactctacttaggtccctgtgtctactcatttcaccttgtttaagctaataggaattctagtctgttgagatcctttgatttagtgactcagtcatcccagaaattacctgtccctcccaggctcatgtcaactacagattgtcatctcaccagtatactcatctgagcaattaattagattatatttggcttataatcatattacaagtttttttaatgtcagttgtagaatgatccatcctttttatttgtacagtgtgaacagaaagctactacattctacatgactttaggacatttacaaaaagttatcttcactttgagaagaaactggataaaaatgaatgtctgccctattataaggttttttttaaaaaaaagcaggtaaaatatcctctgcctagtcttccctggatggaggggtgtcataaattgaactgtctctcccccaaattaatatgtgaacgtcccaactcgcaataactcagaatgtgaacttatttggaaattgtgtggtttgcagatataattagttaagttagaatgagatcataatggagtagggtgggcccttaatccaatattaaaagtgtcctcataaaaaggggaaatttgagcacagaatcggacatacataaagagaagatgacgtcaagagacagagggagaagaagccatctgcaaaccaaggagacagccctggaacagatccttccctcagagccctcagaaggaagcagccctgtggccaccttgatttcagatgcctggcctccagaactgtgtgagaatcaacttctgttcttcaggccacccagtttgtggccatttgttccataagccctaagaaactaatatgaaaggaaagggggcagatggccaatcccacctctctgctcagcagggaaccatgcaaagtccttctctacttcaggcaggaacaaaagtaacactaagagcgagtgaaggtgagccactctctgcaaagcccctctgggattttgaacttctagaagcccaaaaaacagcctatgacaataacaatcacatgaacaattcaacagtacactgaatgcattttaggcttttccaacagcctcttggtggatcccaaaccattttgggaagtaggtggcacagaagttattatttccattttgcagaagacaaattattctcaaatcagaaactggctcaaggaaatgaagctagacagtggtcaactccaaaggagagcccagagacaatgactccctctctgtgttaagaagctcacaccacctgtgctcctctgtgctgtccccaaactcaatcctgtcaattcatgctaggccctgtgttccctctgggcctctacacattcttaaggggacaggactctagggaaggcaggtgagacatcagcacaggcacaaaggcttccttccgattgacaacgagcacgccaaagccagaaaacaagtgacttctgtgacttccgtcagtttacactaagagggaaggtcactgactatggtcttgggtgatgtgacctatggacaattgtaataaaagtggtaccattgcctgctggaaaaggtaggtatgggagaaactgcctgtgggaaaatgatctttgactattttcccctctggatgttgaaactgtcttccaaataactgaattttgttgtgcccccagggtcacatggagccctggtttaagttcttgcgatgtcccatcctcatgaatacatttgtagctgtcttaagcaaagtgaaacaagagcatctttaaggccttcccagtccctccctaattttccttgtgcctctcctctctcctttgctgagcctttgcagctcagagcaccctcacaacctcccttcaacaggagcaccctctctctcctgccaccgcggatctattacatggcacatcctacactgggattgcagagctcagcaagactctgtccccaaagagcccatgctcttgtcaggaaaaagtcattatggaacagggttgggggcacagtgttgggggagccagagtgctggggacacaaggaaaggcaaacgatggacgctatgcaggcatggggtgagatgagagatgtttcccgtaaagatgccctggagctgggtgctaacgggcgggcagaagccggccaggtgaaaagaatggggcagaaactgggggacagaggaggaaagggaggagaaacatgtggatgggggtacagctgcctcccagcaagtcagagcacagggtccccccagcacttcctgggttactagggtgatggcaggtgaatacagaatagcagggccttggaatgtctgccgtattataaggttttttgtttttgtttttgtttttgtttgcaggtaaaatatcctctgcctagtcttcccaggatggagggtgttgcagattgaatggtctctcctccagattaatatgtagatgtcccaactcgcaataactcagaatgtgaggtttttggaaactgggtggttcgcaggtataattaattacgttagaatgagatcatcatgcagtagggtgggcttctagtccattattaccaaggtccttataaaaaggggaaatctgggccaggcacagtggctcaggcctgtaatctcagcactttgggaggctgaggagggtggatcacctgaggtcggaaattggagacctgcttggccaacatggtaaaactccgtctctattaaaaatacaaaaaaaaatagctgggcatggtgatgcacacctgtagtcccagctactcaggaggcggaggcacaagaaccgattgaactcaggaggcggaggttgtggtgagccaagattgtaccactgcactccagcctgggcaacagagtgagactctgtcacgaaaaaaaaaaaaaaaaaaaaaaaaaagttgggggtggggaatttgaacagattttttgtggaaaaaaaaatctgaaaagacatacacacagcacagtgttagaggtcaaaacaatataatgtatagggatatccacattttagctaagtacaactcaaaggaatgaatttaaaagatcaagttcaactcaagaaagacagtcctggtgatgttttcatctgagaaactcagtatctccctcagactgaggcaaaagggactccgaggccaggcctcacagacgggccccttctcatgaggcaaggatcacaggtcatgggatgtgaccacactctggatacccagccctctggaattctccatccaaagtagtggaatccccactccactgacagggcctgcatagtcctcttccctgggtccattcccctgtgggagaccaagccattggtgtacactgagggtccaaacaggtccaccttctggcaagcaggtctcctgatgtgcaagctgcagctggagacaggaagagaatgggactggctggggccatttctccctgggcggccacatccaacaaaactccagggaggctgaaaatttgaacctggtttcccaggtccctatgaagatgtctttgtcagagtaggagacaatatgaaaaagagtactcatatatgtactacacattatatgcacatatactatatatatactatatacatactatacacacatactatatatatatagagagagagaatatatatagagagagattatatatataatatatatagagagatataatatatatatagagagagagagagaaagaatatatatatagagagagagagggagagagatctatctaaatgcaatctgttaatttgactcatgacttaaaattttctagacatatgacatataagactccatttgtacttttgctcccagctctgcaaatattaggggcgggtctggagggcctatgccctcagcttcacgtggccagtgcacaacaactgagagaaacaggtgtcaattttcagagtaacttgtttcctggaaactgttgctcaccacactctatgcccctggtcaggcgttctcaccagggagagaagggtgatttgaggttgaaacagggaaagaggacaggagacaaaggaaataagtggcaaacacttccaaccctaaactttttttctttctttcttttctttctttttttttgctctgtcacccaggctggagtgcagtggcacgatcatagctcactgcagcttcaacctcctgggctcaagcaatcctctcatctcagcctcccaagtagctgggaccacaggcacacaccaccatacccagctaatttttttattttttgttgaggcaaggtcttgccctgtttttgtagaggtgaggtcagttgccctggctggtctcaaactcctgagctcaagcaatcctcttacctcagcctcccaaagtgccgggattataggcatgagccactgtgcctggtcctaaactttcaaatgcctgaaacacatataaaggaaaagctgggacaaggcaggaagaggtgagtccaaaagcgttcaactcagtgcctgccccaagacaaaatggaagaaaaatcaacaaataccgtgagaactctctctgtggatgaaaactactttcattgcaatcagggttaaagagaagtccttctaggtcacccaactttgaccttgaggcatgagtcttcttactcccatctctcttacccagagtgccaggagccagattttagggtaaatatccaagtagcaggttctgaagtaaactgtctcagtagcctgtatcttccatctccttcagtgggctttccagacattggttccgtgcatcaatctctctaaactcatctggcaacagcagccaggcacaaaccctgcagtctttaaagtggcacaaattcacagactgagagatgttcccacgctgcatatgttcctaaaacaaccccgtccaagccatccatccacttgcctccctccaagccacaaagtagtttcatgagctccatttcagttctgagatcaccaacacctgatatcattactcagagtcactggctggagaacagacatcatttctttcccgttaaacattgctcaataatcccaaatagggggcactgcagagctgaagcttagaggtgaatggtaaattctaataagaaagtgcagaaacatccaggatcattaatgctgcattagctccacttcttgccacactggtgctatgttttgtctttctggactggccacagaattttctagtgctttgaaaaatacagtgctgtttcttgcagctaaatggaaacctgtagagagcaaacaagcgtagatccttgaacttggtaatgaatagatgggattctaggtgagaaagaacgaagaagagaaaaacaccaagtctccatattcagaaaaattttttcaatgccaaagttgtattcaatttaaaataaaagcacaaaaaaacataaaattcccttttatacataaaccagtgatatggtttggatttgggttcccacccaaatctcatatcaaactgtaatacccaatgttggaggaggggcccggtgggaggtgactggatcatagggtggacttcccccttgctgttgtcatgatagtgaatatgttctcatgaaatctcattgtttaaaagtgtgtagcaccttccccttcactctctctctctcctgctccaccatgtgaagacatgcctgcttacccttttgccttctgccatgactgaaggtttcctgaggcctccccagccatgctacctgtacagcctgcagaactgtgagccaattaaatctcttttctttataattacccagtctcaggtagttctttatagcaatgcgagaatggactaatatagtaaattggtaccgggagtggggacattactataaagatacctgaaaatgtggacgtgactttggaactgggtaaaaggcagaggttggaacagtttgaagggcttaaaggaagacaggaagatgagggaaagttgggaacttcctagagactttttaaatttttgtgaccaaaatgctgatagtgatacggacaatgaagtccaggctgaagtggtcttagatggaggaactttttgggaactgaagtaaaggtcacttgctatgcctgagcaaagagactgctgacattgggcccctgctctcgtgacctgtggatctgtgaatttgagagtgataaattagggtatctagcagaagaaatttctaagcagcaaggcattaaagatgtggcctggctgcttccaacagcatatggtcatatgtgtgagcaaaacgatgatctgaaacttgaacttatatttaaaagggaagcagagcaaaaagtttagaaactttgcagcctgaccatgcagtagaaaagagaaacccattttctagggaaaagttcaagccagctgcagaaatatacataagtaaagaggggccgaatgttaatagccaagacaacagggaaaatgcctcaaaggcatttcagagacctttgtggaagccccttccatcataggcctggaggcctaggagggaagaatggttttgcagaccagactcagggccctgttgccctgcacaacattgggacactgctccctgcatcccagccactccagttccaggtatggctaaaagggccccagatacatctcaggccactgttccagagggtgcaagccataaaccttggtggcttccacgtggtggtaagcttttgggtgttcagaaggcaagagctgaagcttgggagcctcaacctagatttcagaggatgtatggaaatgcctggatatacaggcagaagtgtgctgcaggggtggagccctcatggagaacctcaactagggcagtgcagaggagagtgtggcatttgaacccccatacagagttcccactagggcactgcctagtagagctgtgagaagaggtcactgttcttccaatcccagaatggtagatccactgacaagttccaccatgtgcctggaaaagccataggcactcaacatgagcctggaaaagcagccaagaggctgtaccgcgcagagccaaaggggcggagatgtccaaggccctgggattccaccccttgcatcagtgtggactggatgtgagacatggagttagagattattttggagctttaagatttaatgactgccctgctgggttttggatttgcccctttgttttggctgatttctgccttttggaatggggagtatttagccaatgcctgtaccatcactgtatcttagaagtaactgactgggtttgattttacaggctcataggtggaagtcacttgccttgtctcagatgagaatttgtactgtggacttttgagttaaagctggaatgagttaagactttggggactgttgggaaggcataattgtattttaaaatgtgagaaggacatgagatttgggaggggccagggatggaatgatatggtttggatttgtgtccccacccaaatcccatatcaaactgtaatccccagtgttggaggaaaggcctggtgagaggtgactggatcacgagggtggacttcccccttgctgttatcatgatagtgaatatgttctcatgagacctggttgtttaaaagtgtgtagcacctcccccttcactctcttcctctttctctggccatgtaagatgtgcctccttcctcttcaccttccaccatgattttaagttttctgaggcttcctcagccatgattcctgtacagcctgtggaactgtgagccaattaaacctcttttccttataaattacccggtctcaggtagttctttacagcaatgtgagaatggactaatacagctggatttcctttagggaagggcttattaaaacctgattttttctaagctaattggaactatactttctttcagaacaagggagagaccctttagaaaagggttaaaatcaggagtctgtagatccaggctgtttataaacttcctgacattttatataatatatcataattatgcatatcacaggaagttagagaaagattccttaagcttgattggatatacatggcgatcgtaacccccaaagtaagaactactattgtggacacttaacttacaacaaggtatgataaacacgtgaagaatgctcactgctattagtcatcagggaaatgcaaatcaaaaccacaaagaactaccacttacaaccactaggatggctataataaaaaaaagcagataataacaagtgttggtgaagatgtagagaaacggaaccctcctatattgctgataggaatgaaaaatggtgcatcactttggaaaacagtcttacattttcctcaaaagggcaaatatggagttaccaaatgacccagcaattccactactaagtttagacccaagagaaatgaaaatgccgttatacaaaaacttgtacatgaaagtacagagcagcactattcataatagtccaacagtagatataacccaaatgcttattaactgatgaatggatgaacaaaatgtggtatagacatataatggaatattatttgacaacaaaaggaaatgaaatactgatacatggatgaattttaaaaacactgtgctaattaaaagcagtcagatacaacaggccacatactatatgatttcatttatatgaaatgttcagaatagccaaattcatagagacaaaagtagatgagtggttgcctagggtttgtgggggaggagctggagggaaatggaggataattgctaatgggtaggggtttcttctggggtaatgaaaatgttctaaaatttatagtggtggttgcacaattttgtgaatattctaaaaatcattaaactgtacacttcaaatgggtgaattgtaggctgtgtgagttacattttgataaagctgttattaaaagaaaaaagaaaagaatatgtgagcctattctccatctaagtggcccactcctctaccccaggtggggagacaccaggaaggctttgggaagggaccaacaggggtgcatggaaaacatgagtttgatatgaaggaaaaatgctattgccttcagccatctcattctcacccttggatacagatccctcaaccagggaaggaataactgtctttaaatgcactgaagaggaggttcccatggagactggggaagttagcataagactatcttccatgatgatgaggaaagactgaatacactgtagcacaggcactcgcagacagacccctggccaggttactgtgggacaggtgcccaagtccatagaagagagaactgtaataaagcaagagggaaatacagtttctttcccaatcaggcagatccacggcaatgctgctttgaggcttcacgtgggcaaggaagacacactgggcagtgatacatggatttctgctagctgctaaagtggtcccatccactcaggtctctgatagtggtcctctggccacaactgtgccaaaataaaataatacatgctatggtaggaaattaatgacctcctaaaatgtctatgtcctaatctcgagaatctgaatatgccgtgtggcatggcagggaaaactggggctgcagaaggcactaaggtggctaaccagctgaccctgagaggagttatcctggattatctggaggatcccactgtaatcataagggtccttaaaatgaaaaggaaggtaggagagttagcaatagagtaatgcaatgcaagaaagattcaactgggcattgcaggggaaaaggggaccatgagccaggaaaggcaggcagccatgggaagtcggaaaaggcgaagaaattgattctctcctagagcttccagaaagcatggccacagtaggagtgaaatggaggcacagagaggggtatttgtctcaagcacacagctattaagtggaggggccactgggatttgaacttagatcaatagaccccagagcctgtgtgcttaactaaggaccctaaaagactattccagcctggtgagctgagttcctgtttgagaggagtctccgcagcctgagtctggggggttttcgcacctgtgggccatgggtgcccccggggaggtggacacgctgcaaggtggaggttgtgtgccacgtttccaggacaccatatggccccaccctggtccaggtgctgctggagcaggacctgtgctgtcactgctctctgacaccgctccactgtctcctccaaaggctcccaccctggtgggctctgcacccacagatttgatgaaactcacaggagtcaagcatcggagagtagtgactgggggttgtgtgtggggagattaaagacatttatatttttctttctcacgtaagatgaagactggcgtgaaagcacatttctattttcaaaagttaggtttggtaacacagtgcagagcagatggatgaggagaaaacgaagcaacaaaaaaaatgggcctcagccaggtgcggcggctcacacctgtaatcccagcactttgagaggccgaggtgggaggatcacttgagcacaagagtttgacaccagcctgggcaacatggcaaaaccctgtctccacacaacaaatgaatgaaatggtttgctgggcacacctgtggtcccagctactcaggaagctgaggcagcaggaggatcacttgggcccaggaggtggaggttgcagtgagccatgattgcctcactgcagtccagctgggagacagagcgagcctctgtctcaaaaaaaaaaaaaggccccctcacaaagcagtggggctggaaaagggagatgggaactagaggtgggggagatgggagccggtgatcagtgggatttggtgaccaactagctatggagaatgagggacagggaagagctaagacaactatgggccttccagctcaagggcagctgggcagaagttcaggactttaacttagaggcagagggaaagggaggatgctgagaagaaaacaaacatgccgaattagggcagacatgctcaaagggccaaccaaagtacatgtctgggattccggacagatccgggtccctcctctcttccccctttccatctgttaaaatcccttgtctcttctactgtataaaccaccctggtgtccccatcctcatgggcccccatggcactcacacccctacccagttaatgtcccctcctgtctgctcctgatgcagttttctccacgtcactagtgtagccaccttgttcccctcaaaggtgtgttttgagccccccactcagctgaaatgcccccggactcagtaaaggaacagaactgagtgtgttcaggaagttgacctaggggaggaggggatcggtgcagagtcagggaatggggaagagaaacaggtcagagggcttcagaaaacctgtgatgctactcatgatgaatatgcaggaaggaaggagagaggagaggagacagactcacagaaggtatgaggccatgaggaaatgcagacatgcacacatgcatacacatgtgattcctcaagctcccagcaggcttccagcatcaggagctaaaattgctaccactgataaatgaaaaatttaaactccccactgggaaggagcatttcaagtaccattcctggatatcgccccctccaattcttctgtccactgatacgctagcatagagcagatgtgatcatttgaagcttcaacaaagaatcccttgaagatgactgtgtatttttttttttcctaaatcaggaacaccagaattaagaggaaggtagccatgcaaaactcaacactgtttgtcaacgtgggtactaactcggctgtgtcttggataacacatcaacttggtaaaaacacacacagaaaagaaaacactttcttccaactgtcagagcaaaaatcctttactcttctgtccagcaacctgaacaaaaacaagggaatttgtggcttggtttcctttacaaccttatcttcactccaggcaccatcccctgtctctaagcaacagggcacactttggaactaccaggaggcaaaacccagtgcttatcctgagtcttttaggactaaacaaatcagggcagagcaattggtccctcgcaaggtagagcccaaggagcccatgggaaggtacgtggccccaaatatcttcatcaaaccccatgcataccctggcactcctctgagttccttagtgcctgaaattccacctctccacactcaacccattggcttattcccctgtcggctccatgggggcactgactcagtctatcaggtgacttctcccacatccccactcccaacaggaaagcccaacatggctctagtgtgaagaggaggctgacccttgagaacagggcacagagaaggaaatctagaacgtcactgagacttagtgatttttgtagaaaaatgaggagcctggaggaaagtgtttgattaaaagagaatgagggaaaatgcctgtattgctatgttgacatttaagaagactgtttgcacctgcaaacaggattcagagatttttttttttctcccatcagcatgccccaacctcttccctaacatctctgagacagaaagaatttctgagaatatagagaagagaaataaatgaacaaactctctgggaatgacagctctgaactttaataagagggagagaagagagctgatgagtacaaggctctgcagcagaaaggaaatggaatttggaagtggaaggagctgacaaacagtgctcataactgctgcatccaatagtcaggataactgctatttatctggtacctttatttctcaagcaggctcgtgtccatgaccttattttatcctcaaatcacctgtgaagcagagggtggagctggaattatttatctcctggtgaagccagtgatatcacaacttggagaagtcattcttacaatcacctacttggtgattttcaaaataagacaggaattatagattctgactcccaatgcttacttaccattgattctggaaaatgtggatggtctaaattgctatcgtaaaaatgcaatttcccaactttatttcatccatgagctttgagttcatttctaattaaattttttcagtagcccatcaacaaaacagatcagtttgagattcttctccttgttcattctctcttaaagagaattattaagaagaagcatccgaattcatttttgagccctcatttgatttccatttaccatctctgtgttgctgaagctgtggaagcaacagtctccatggctgagagtagagcttaagttacgcagatgggctgcaaagattaattgccattcttaaagacgccgatagaactatgaaaaataagtagtaatagtagtagtaggaagaagaggaggagaaggaggttggagaataggggaagttaccatgctctagtaaactgcaagatgttggcatatgacaaaccttggtacaagatataagacaaaatgaaatgggatcgagcgtataatccctgtggctactaactactgcattagtagacaaagcaacaattaggatgagccgtgaatgaggatgtggtgctgtcccttagggcaggtaatacccaaaacatgcagccatacacttgtctattctccaaagagctgaaccactgaagaaatggtggtctgaaatggcttggaagtctaggtgttattgggagcttggattcgtcacgagccccctaggggcttcacacacatactgattttgcagacttctaccccctcgaatattctgtggagaacaacctatttttttctatcctctcccaaaccgccatgctgagctcatcgcctctgaatttatctccgtgtcaaggagaagatgacagccaaaagtaatacattttgtttaagtcaagtcatgacacatctatgccaaatggagaactcagctggcaattaccacactgaaaagtgggacaaacaacagagcaaggaatagacctagaagtacatttaggtgtcatttcacccactgtatttaaccagagaaagaaaaagaaaatggaattttgatttcagaatccaaccttggttaatggttatttgcagaaaactagaaacattttaattattttcaactccacaccataacagctatcaagggaatggagacaaaacaaacagggacttattaaatacataattaatgtgcactaaaattcgcatatatgaatatgagtaagctgggaccattataaggtatgcaactgaaacgtgatcaattaattaaacctgttatttgctggggctttgggaaaaatggggccacctcaacagaggagggagactcatcagcagatgagatggctccttggtggtccatcctgcttgcaaagtagccaggtatttcaagaaacaaaaatcttagaaaagctacaattttctttacagtgaagcaaaaataaatcaagcccttgtcaatcaagaccttaatcaagaccattgtcaagctacaaatagattactttattccctcttgcctggtctccagtctccattataatcaaataaaaatacttttcaggcactgcatctggtttagaaatatagtctgtggccaggaaacaaaatgaagaaaactggcaacacaggaatgaaatcacttgtagcgattattaataaccgtcctcttttgaaatggattaaagtgcagtacaacaataggttataacatggaagaagaattcagatattcagatattcagaccttaagaatgcactttatccttatcacaaagcagcaaatgaagtgctgtgcttcctagcagccaaagaataaaaaaaggtctacacgatcaatgtctgtcattcccacagggaggcaaagcttttccaggcagtgtattctaaaagttttatctagaggcattgggggatgaacaggacaatggctctagcagaaagctgacaataaagactccagtgattttcatctgacggttaacatcctttctttcaaacctgagttaagtcacaggaggctgttctgtgagaggggctaagctgacatagaccaatgatgttggcttgggctggggtgaggagaggttgtctactggcagataacacataacaccagaggacaagatgatgagctactatttcagcccttgtgcagctccttccatcccccgacatcagacatcatgatgctctcgagcctgctacacaagtcccggcacaactcgcaacccacttcagtccccaactcaggaaataagaaaaaaactcagaaccaacaggagcaagagaatggtatcacaggatgactctgcagcatcctgaatttatcagaaacaatgtgaaaaggctgacatttaaattattttattcacaatatatgtaggacataccccatgactgagaacagctctcttacactgtcttccagaaatggaactcctcccaaggcaagcttgggtaggcactacacaacaaacaatttgtgaagttacttttttttgctaagggtctagtgcagtgtcatccagtagaacttcctgtgatcatggaagcgttctacatcttgtgttgtccaacacagtagccactagatacaagtatttgatgtgtggctaagtcatgctaaggagctaaagtttgcattttattccagtttaactcatgtaaatttagagaactacaggtggccagggactatggaattggacacagcaagtctaaaagatcttactaggctgggcacggtggctcacgcctataatcccagcactttgggaagctgaggcgggtggatcacctgaggtcatgagtttgagaccagcctggccaatatggtgaaaccccatctctacctaaaatacaaaaattacctgcgcatggtgacacacgcctgtaattccagctattgaggaagctaaggcaggagaataggttgaacctgggaggcggaggttgcagtgagctgagattgcgccactgcactccagcctgggccacagagtgagactccaactccataaacaaaacaataaaataaaataaaataaaataaaataaaagattgtattaaaccatgttctagccaatacctggccatgggagaaagacaactggaagttattggaaactttgcttcctaatacaaaaatgtattcaaattctcttgctttagttttctctttaatttacataataggtaggaggatggcataatacaatcgacgtggaaatgagtcttgattttaaccccaatcctagcgcagcattagactttcactctggctgtagcttccttgatctgaaggccagaaagtagggctcaggcatctgcgcgtctgtcgcctgtgcaggagatgacagaatgtctaaaagtttccctgccacttttatttgggatcacggaggattcccagagttgtgattttgccctctgggcgttggtgccaactctcatgctcaaatccaacagcgtcatttagaagtgtgctaccggcttctgcctcagtgcacaccaggaacatgatatgttgagcaaaatgtcatcccatgtaggagcctgtgctaattataatgtcaggcttcccactgagatactgataattaaaggagaatattacaatgttttcaaactcctgcagtaaatgagaagcatcttcaaatgtaacctgttggagatgaaaattaaagccatctgtgacgtccccatttaagacctccacaaccagaaccagacaatttttgaggatcaaagcaagttgaaggcaaaagtaggtgggtggtagagtttgggggaagaggaggaggtggaggggaattaatgttttccaggtcctgctgtgttctaggaaccacaatactctttatttttttattgagacaggtcttgctctgtcacccaggctggagtgcagtggcacaagcacggctcactgcagcctctacctcctgggctcaagtgattctcctgcctcagcctcctgagtagttgggactataggcatgtgccaccacgcccagctaatttttgtattttttgtagagacggggttctgccacgttgcccaggctggtcttgaactcctgagttcaagtgatctgcatgcctcggcctcccaacgatacactctgaatagcagataacacagtgggtggccctgcttgttgctactgctgtcgtctcaataatgaactgccaagtagctattatctgcattttacagctgggaaagctaagactctcatgatctcacctaaggttacctacctagtaaagcatttggtggctccaggatccaagtcttggcctttctgctctaaaggttgtgcttgtcctatgcctgtgggcgaccacctgcttgggtcctggagcatcagtggtggtgataggtgtgcaggggcctcacaggcattcattttacacatctcctagagcacccacagtggtgggccctgtgtacggtgaggcttcctgcccaggtttccctgcccaagtctccttgctgaactgagcccgatgcatctggagtgagaactacgccaacgtggtgctgcagacattaacatttaatgtggcaagcttaagaaaagcaagaagcatttcctgaacttctctgtaactctctctgaaaaacagtgtgatccacgggaagaaaagaaacacagagctcaccagtgagacacaacacacggagacagagtgtgagttaagctgtacccatcattgcttgtgtggcctcgggcttttttttttttgagacagggtctcgctctgttacccaggctggagtgcagcggcacgatctcagttttctgcagcctccacatcccaggctcaagcgattctcctgcctcagcctcccgagtagctgtgactgcaatcacgcgccaccataccccactaatttttgtattttttgtagagatggggtttccccacgttgcccaggctggtcttgaactcccaggttcaagcgattcacctgcttcggcctcctaaagtgctgaaattacaggtgtgagccaccgtgcctggtcttgggcttgatctttaaactttctaggtctcagtttctaaaatgtaaaacagggacgcaaatatctaaatcatgtatgtggtgcactttatacagcgtctggaaccttgaaaggcccccgtaagtggcagcctttagcattattggtatattttattatggtcaatgatgcatgcctttgtgtggtgttctgcttcctcattaactgagcctgagtcgccggctactgagaaggcccctccagtttctggaagcagagcaatgtgaagcagaagctgttgcatcacggtttctcctggaaaggtctgtacctaacagtagaattttctgctcagtctttaccccaggaaaatgaaaaatcaacatgttctttctcatggctagtagctcctttcttgcaagtcggggccctggtctcgcactgctgcccctccaaagccaccctttgcagcacggggagactgcacaagggcaagctgaaggtccaggctcacatcaccaatgtcagcagcagcagcctccctggccacctgcagctgtccgcagacttttcagcattccaacagatcctccatattccacacaaaatcaaaatccacagcaactgccacctcgttggaaagcagggctcaaaaaacaactttatttttctcctgtctattgacttggaggaaaattcactagattttttaaaaatgtactataaaaatgtatattgctcaaaaaaaaaaaaaaaaaaaaaagcaggactcatagacaccccaagcaagtgccatggtaggtgggacagagattatccctttgtgtcaaaggactctgctggatggaatgaatgggaaggaacttaacaaaaagaactggcttcaaagagttcaaaggtttccatatgacccagcaattctactccaaggtatgtacccaagagaacacaggtccatacaaagacataaacacacatagcagcattacttacaacacccaaaaaagtaaaaacaatccaaatgtccatcaagtgatgaaacagtaaacaaaacacggtgtatccatagaatagagtattatctggccagaaaaagaaagacttactgatacatgctacaacatcaacgaaacttggaagcatcatgccaagtgaaagaaaccagacacaaaaacatacatattacatgataccgtttaaatgaaagtcagtcccggttagggaaactgtagagacaaagtagattagtgcaggggctggagggagggaggaatggggagtgactgctaataagcatgcagtttctttttttcctcagaggtactgctcaaagagtgtggggtttctttacagggtgatgagagtattcaggaatagtggtaggttgggtacagtggcttacacctataatctcagcactatgggaggctgaagcaggaggttctcttgaggccagcagttcgaggccaccctggccaacacagcaacacccttgtctctactggaagaaaaaaattaaaattaaaaattaaaaagatagtgatggtggttgcacaacctttcagatatactaaaaccactgaattgtgaaatttatttttctttccttttctttttttttttttttgagacaaggtcttgctctgtcaccttggctggagtgcagtggcacaaccacggctcactgcagccttgacctccagggttcaagcaatcctcccaccctagccttccaagtagctgggaccacaagcgtgcaccaccacacctggctagttttttaatttttcgtagagatgggggtctcgtcatgttgcccaggatggtctccaacttctgggctcaagcgatccacccacctcagtctcccaaaatgctgggattacaggcatgagccactgtgcctggccttgaattgtgaactttaaaagggtgaattttatggtatgtgaatcatatcacattcttttaaaaaagttaacagggactctttcctcagtgtggaagtgtaattgacagacctcctaactaccagtgagcgtggggatgagaaaatgccacacaataaagttgcttgagaaagagagagattgagcgacagatcatgtgtgagatggagtagggtcagtaaccatttaaatatgccactgaccttgagaaaaagaatgtcagctataatcacaagccacaaacgtctgtcactgtgaattggctcatcacgaagaactgagggataacatggagttatgatagcagtggaggcaggcaggggaaaagggcccatgagatatggatggcagcactctcccccattccctgccatccccactgcacatgtataagctaagtaaatattacgtcgtcttttactaacaccccaaaactctcacttgatgaaggaccaggggagtaagttgctgaatgggctcattaagacttaggaattctttagaggctcaaacacagaaagccagtgatgggaaataaggatgacacagctgatagcccatgggagtcccagggtgagactaagactccataagagccaggcttagacttataaaggaatgctggctgctgaagacatttcagaactcaagctaagaatctctggcctgcattcagaagatacctttggtctctgtggttggccaaatgatggctccaaatatatccaggtcctcattcctgaaacctgtgaatgttacctttcatgacaaaggagatttttcagatatgattatcctggataatctgggtggtccctcaatgcaaccacaagaatctttataaaaaggcagagggagatttggcacagaagagaaagcagtgatcctggaggtactgattggagtgatgtggccacaagccaaggaatgcctgcagcctgcagaagctggaagaggccaggaatggattatcccctagagcccccggcaagaacacggcccttccaaccccttgactttatcacagtgaaactgatgtcagacttctggcctccagaactgcaggagaataaatctggattgttttaagccactaagtttgtgataattggttacaccagccaaagaaaaccaaggcagtccttcattctgcttctaacttgtctaaatattaaaacatccccagtaagatgatctctagcataaaggaataacatctctctacttctgtgcataagttgagggttgaggtgttgaagtggttaggtgatggtaactccttgatgaactgagtctgatgcagctggagtgagaaccacgccaacgtggtgctgcagacattaacgtttaatgtggcaagcttaaaaaaggcaagaatttcacctttccaaaaaagcatttttatctgatcgcaagtcataaatatttactacaggaaagcttagttataaatctcacaaaaacaggaagaaaataaaagtcatctgcaatcctatcacccaggaataaccaaccactgtgaacattttcatgtctaaatttgggttcctgttccctgaaacaaaaaatcactttggattaaaatcccaagcatttctttgaaagccattatcaggagctggcaatgaggacaggccacatgaccaaaaccaactgttgtgtggttctagcaacacaaacagtggtccccaggcctctatgtcatagcaacaaccagcaaaacaaacttggctcttgatactattgagaggaaaataaaaagcatggaattcacctaccctcttctctggacctttaaaataatttcaaacacaaaaggcagcaagagtctgccaatgtatcatcaggacccacatgagtcaatgtcctcccttggcccacctggacaatgtagaaagaaaattaggcggctgggagtggtggctcacacctgtaatcccagcactctgggaagccaaggtgggcggatcacctgaggtcaggagtttgagaccagcctggccaacatggcaaaaccccgcctctactaaaagtacaaaaattagatgggcgtggtggtgggtgcctgtaatcccagctactcaggaggctgaggcaggagaagcttgaacctaggaggcggaggttgcagtgagctgagatcgcgccactgcactctaccctgggtgacaagagcgagactccatctcaaaaagaaagaaaattggctgggtgcagtggctcatgcccgtaatcctagcactctgggaggccgaggcaggcagatcacaaggtcaggagatcaggaccatcctggctaacacggtgaaaccccgtctctactaaaaatacaaaaaattagccaggcgtggtggggggcgcctgtagtcccagctactggcgaggctgaggcaggagaatggtgtgaacctgggagacggagcttgcagtgagctgagatggcgccactgcactccagcctgagtgacagagcaagactccgtctcaaaaaataaaaaataaaaaattaggacacctaactctcaaacagcccctcctctcttagaatggagggcaggtacccaatgcaccagttcttctaggtgctcaagtatataatacatattgaatacatcaaagcttcagtatgtgttataacattgggccccccaaaaagaacgcagtatagaacttcttgcaagaagctccatctatcaggggcaaataaacatgtttaaatacaggtaattgcatccatcaagagttgaatgaataaagaaaatatggtacatacacacaatggcgtattattcagccacataaatgaatgagatccggtcatttgcaacaacatggatggaactggaggttattatgtgaagtgaactaagccaggcatggaaagacaaacttctcatgttctcacttatttgtgggagctaaaaattaaaacaattgaactcatggagatagagaggagaaggatgtttaccagaggctgggaagggcagtcggggagtcgggggaaagtagtgatggttaataggtacaaaaaaaaatagatgagtcagacctagtagttgacagcacaacagggtggctatagtcaataatataataattgtacattttaaaataactacaagtataactggattgttggtaacacagaggataaatgcttaagttgatgggttatgcattacatacctgtatcaaaatatttcatgcaggccaggcgaggtggctcacacctgtaatcctagcactttgggaggctaaggcgggagaatctattgagcccaggagttcgagactagcctaggcaacatggcaaaaccctgtctctacaaaaaatacaaaaaaaaaaagaaattagctgggtgtggtggtatgcacctgtagtcccagctactcaggaggctgaggtgggaggatcaactgagcccaaggttgaggccgcagtgagccatgatcacaccactgcactccagcctgagtgacagagagagatcttgtctcaaaaaactatgtgtgtgtgtgtgtgtgtgtgtgcacgcacgcgcatatgtatttcatggccccataaatatacatacctatgttactgacaaaaattaaaaataaataaataaataaaacacacaaacaggtaattgtaagtcagagtgataattatggtaacagaagataaaggatacagcaagacagcacaaaggaaggagtgattaactttgttaaataaatgaaattaataataaatatttctatgattcttcacagttatcatccaatgctaaggctagaaggagccataacaataatttaccacaatcccctaaattttcaaatgaatgaatgtttgaatgagataacccctagaatctctttaagcttccaatttaactttctcccatacaaagcaatggtgcagttcactgttgagaccataaggtactcatgataagtgattagtaggaactcaattgctaggtgatttttaatgccattcaaaaacagaagggccaggaatctttggaaggctcagagcccttcaatctgtatgatactgcatggacagcacttcaagagacagtatgctcaaaaggctgcagtctcgggttggttttctaaaaaaccatgttgtttcctcagggtgtccttctgcagcagacacaaacaccctagaccacccccacagatgcacccaggcaggcgccacggaagtagcttagaaggaggcgggtggtgtctgcactctgtttctggagtctgccttttagtgctctttttactgcgcctgcctgcatctgctggtctgcatcagtcattaccatttcttcctaagacatttcaattgcacaactatacttttctttgtcctctaaaggggagggttttttgcttatttgtttttttctgagatggagtcttgctctgcctccaggctggagtgccatggtgcgatctcggctcactgcaacctctgcctcctgggttcaagtgatcctcctgcctcagcctcccaagtagctgggattacaggcacgtgccaccacgcccagctaatttttatatttttagtagagacggggtgtcatcatgttggccaggatggtttctatctcctgacctcgtgatctgcctgcctcagcctcccgaagtgctgggattacaggccgtgagccaccgcgcccggcctggggaggggttctttcctgttctagggttgtggatagactccataaagtctaaacacccagaattgtctgcaaaatattgtgtgtggctgtggtctcaaggtttatgtctccccagaattcatatttggaaacctaatccccaatggtattgttattaggatggtggggacttagggaatgaatggtattaggaggtggggacttggggaagtgattaggtcgtgagatggagctcttatgaatgggattaacaacctcatgaaatgagactccagagagtgccctctttccaccatgtgaggatacaacgagaagacagtcacctgcaacccggagaaggaccctcaccagaacctgaccacgaccatgctggcagcccgatctcaggcttccagcttccagaactgcgagaaataaatttctgttgtttctaagctacccattgtatggcattttgtaatggcagcctgaacagactaagacatgtgtacaacatcctcttgtgagatggtgtatagctcttatcagattcacaggacaactgtgaaccacagaagcttaagaactatttgaccttgcacatgtgtattaaatattaacccaagagccccagacgtgtgcatatgccttcgggtgtggcctcacactctggatacctccgggagataggctactattaacaagccttccattttccttctactccaaaaaaaaattttttttagcaaaatgtcatcctcaggacatactaaactgaaatagcaaagacaaaaaacttcaaaaaaaaaaatcgattctccatttagtcattgtgaaaagtctgtcttaaaaacccagagtctcagggaatgtcaaagctctagttaaatttttaatacactataaaggatagtgttaaagaagagaccttttcaaaggtaagttggctccaaacaggctcttaaaatggtcctcatcaaagacatgaagctgcttgacagtgatggtgagggagttcacttctctttagacaggattaggagctgaagacttgaggaatgagccacagtgggtctttggagacacatctatttgtagttagacccttggtggcttcatccagtgtcaggggtttaagtaacattcatgtgccaagggaccaggcgcagtggctcacgcctgtaatcccagcactttgggaggccaaggcaggtggatcagttgagtccaggagttcaagaccagcctgaccaatatggcaaaatcttgcctcaaccaaaaatacaaaaagtagccaggtgtcgtggcatgcgcctgtagtcccaaccacttgagaggccgaggcaggagaacctcttgaacccaggaggtggaggttgcagtgagccaaaattgcgccactgcactccagcctgggcatcagggcagactctgtctcaaaaacaaaaaacaaaaaaacaaaaaacattcatgggccaatgattcagaaatctataactctagctagactttgcaagccaactccaaactcatgtatccagctgtctagtcagtatctccatttgaatgtctaatggcaatcaaacctcacaatcaaaaaacaaattcctgatagtccccctaaagcccctggagctgcagccttcctcgtctcagttgatggcaattccatccctgcagctgggcagccctgaaacctccgggtccctcctggctcctcgctttctctcatatcccacatccaatccatcggcaaatcccattggctccaccttcaatcgggacccaggaagggatcccttctcaccacatccagcacgaccaccttggtctgcaccactatcatctttgatctggattctgcagtggcctctacataggcctccctgcttccatccttacctctcctaagtcccatctcaattcagtatctaaagagaaacaaactttcaaagctcaagtcaagtcatacacaccctcttcaaaactctgcaatggctcatcacacacagagcaaaaacaaacattcttatgcctccaagttccatctaaaggaggggctgacatccctgccctcaccttgtacttctctccctgctgctcaccctgctgtggccacagtggactcttggctactccttgtgggggccagacatgctcctgcctcagggcctttgcactggctgttccctctgcctaaaacactcactgtttcccagagatctgcatgactgactcaaattcaaggacatctcaaggagcccctccctacctactctatttaaaatggcaatttcttcctctaacactctaccgtctcctctgccctgttgaactttttctttttttaaatcactaaccaccttctaacacaatataaaattcatttattatgatgatgttcatcgactatctcaccttgctataatattggttatagaaggccagagatcttggtctgttttagtactgatataacccaagtacatggaatacaatactcaaatataataaataaaagacaagactgggaaagaaatgtcccttcaaacctctccatccagtcaagccagctgtcctccagtttactgaaaccagtgactattaccaccatgcttctggtgaaatctaactcaattgagattcctggaaggcactcaatcctcatttcaatttattttttattttactattatttttgagacggagtctcgctgtgtcacccaggatggagtgtggagataagagaatccatctttcaaaccaatgaatctctctctctctctctctttttttttttttttttttttttttttttgagacagagccttgctttgtcgcccaggctgcagtgcagtagcatgatcttggctcactgcaacctctgcctcctgggttcaagtgattctcctgcctcagcctcccaagtagctgggattacaggcatgtgccaccactcccagctaatttttgtatttttagtagagacggggtttcgccatgttggccaggctggtctcaaactcctgacctcaagtgatccgcccaccttggcttcccaaagtgctgggattacaggcatgagccactgcacctggcctcaatccttatttgaaaaaatacttttgcatcaccatagaagtgacaaaggctgaacttagacttggaaactccaaagacacagaatagggtctcctgtcagggaagaagtaagattttaatttatgctcatttaagatcatcaaatattgctgtcattccacacatcttcctcctgtttctggctttattccaagttgtcactggagtcaacaaacatttgagaaagtaaactctgaaccatcctggccttccattgggatgagccaggaaataattccagctgagcataatgaatcacccaagtacagtggcaggtgtggtatataaaagggtccattagaggaaagttggatactcattccattgctataaagtctggaccttagaccacatttttgttcttcagagaaatagttgccgtaatacacctcagtgtagttaccttatttaacactaaacccactgggcagatctttactcttcctcaattggctaaagaaggggtcataaatggcagaaagacagctactattatgaatgaaaaacaagtaacctctcttctctaactattagcacttaacaggctacaagttgctgtcagggctcctaagtagtcctctgcaggggaccaaggggtctttcaatgacctctttaagatacggggtgggcacgagcagggtcttccaccaaggctaacccactttggccatctttgtgcagtgaggtccatataagaccccatctttatctcaagacatactgaataccaagatctagaaaaccaacagggtcagatgctgtggctcatgcccgtaatcccagcactttgagaggctgaggtgggctaatcacttgaggccgggagtttaagaccagcctggccaacatggtgaaaccccgtctcttcgaaaaatacaaaaattagctgggcatgatggcacacatctttaatcccagctactcgggaggccgagacaggagaattgcttgaaccgggaagtggagattgaagtgagctgagactgcaccactgcactccagcctgggcgacagagcgagactctgtctcataaaaaaaaaaaaaaaaaaaattggaaaaccaactaaaaaaagcttattcataactcaaagaaaagggtcaagaggggaatgagggagacacataaactgatgaaaatgttgggaaaactggcctacctatgatcgtatgatagacattcctaagattaggatagaaataacagaggaatgtgcttcttatctagagaaatatctgagcttaaaaagtaattaaacacatagtgctttcggcagatttaatatatactagaatatataatatgtattagaattttcacactttaaagacgacaaaaaaaagtcttcattgtgcaagcaaaacaatatcaagttatacagaggaacagactcactttggccatgctttttgcttccacaatactaaagccagaagacaagggatcaacatctgcagaagctttgtagagaaaaatgtcatgactagaaagctttgcccagccaagttcttgctcctgtattagagtaacagattggcaccatgaactctgcaaggactcagaaaatgtatcacccaaggatgctccctggggaagattattgctcaaactcgaattcccaaacaacaaaaggtgggtcagcatgtttaagatctcaagatcgaggaaatcatggctgaaaaggcagcaggagtatcatcgatgccaacaatgcgctcgtaagtcccaagcactgtactgaaagctgtatgtatatttagcatctcatttaattctctaagtaagccacttgtggcattatccccatttcttagatgagaaaaccaaggttcagggagttcaagcaattcgtcaagataacctccttaggaagtgagagagttggaatttcaaaatgcatcccaaattgctcaggttccctcagtttatttatttttaaaaatatctttatcatttcctatgcttaatcatgttttctagttgctctaaaagaaacattcattgtttttgaaataaggcattaatatgtccttttttccaattaaaatacatctaaagacataaaacaggccagcgtggtagctcacgcctgtagtcccaacactttgaggggccgaggcaggtggatgacctgaggtcaggagttcaagaccagcctggccaacatggtgaaaccccatctctactaaaaatacaaaaaattagcaaggcatggtggtgcacacctgtaatcccagctactcaagaggctgtggcaggagaatcacttgaacccaggaggcagaggctgcagtaagccaagatcgctccactgcactccagcctgggggacagagcaagactctgtcttaaaaaaaaaaaaagacataaaagaaattactctaaaatgctaaataggaaaggattggtaagaacatttcagaaagatgcccacataaagaaggcaggtaaggcaattatcagtgccaaattatactgaactcaatagacttgaccctcgaacaatgcagacgttaggaatgctggttccctgcgcagtagaaaatctgcagagagtttttggcttccccaaaacttaactatgaataacctgctgttgaccagaagtcttaccaataacatagtcaattagtacatatagtgtatgttatatgtattataaactgtattcttacaatatagcaatctcaagaaaaaatgttattaaggaattcataagataacatatatttactattcattaagtggaagtgagtcatcataaaggtctcatcctcatcctcttcacattgagtcagctgaggaagaggaggggttggtcttgctctctcagggggcagaggcggaagaaaatctgagtgtaagtgaactcacgtagttcagatctgtgttgttcaagggtcaactatgttttcaaatagcattaagcagaaccagagatacccagtatttataaaagataccctccacagcaatcatgtaacagttatgaatttatgctccaaataacttggtaacaaatatgtaaacaaaaaggaagtagaagttgtttaaactaaccggaatgggaagttttcacatatgatgatctatctatgacgatcaaaaaataaagccaagaaagatttgtactgccaccttcactcctctccaaaaaggacccacgtcacaattgccccttccccttttccagccagacaactgtgctgacaaatgactttaccttcaggcagtggctgtcacgctcacgggcaagacctcacctggaacgttgtgtatagtgatggccaagatgagcagtgcgatcctcctccagctgctgccgccgggctgtgccagattccctcgagaaggcacagggacagcaggaccctctggaaggccagtggctgccgccttctttctctgatatgcctcaccattctcactcttgtctgagcaaaaaaaaaaaaaaagagagatggggaaagacagcgctttgaacatgtgcacgttaactctccagcaagctacagcaggaagaagcttctttttcttttttgagacagggtcttactctgtcacccagcctggagggcaatggtgtgatcacaactcactgcagccccaacttcccgggctcaagccatcctcccatctcagcctcccaagtagctgggactgccatcttcactcctctccaaaaaggacccacgtcacaattgcccattccaaacttcctgtagactatgcatgcttctgtgtgttctctcattcactcaggcatccattcattcagcgaacaattcattgactaggctgagcatggtcactcacgcctgaaatcccaacacttcgggaggctgaggcaggcagatggcttgagcccaggagttcgagaccagcctgggcaacatggcacaatcccatctctacaaaaaataaaaataaagaattagctaggcgtggtggtatgcacctgcagtcccagctacttgggaggctgagatgggaggatggcttgagcccgggaagttgaggctgcagtgagttgtgatcacaccattggcctccagcctgggtgacagagtaagaccctgtctcaaaaaagaaaaagaaaaaaaaaatcactgaacaggcattcagtgcccaatgcataggtaccaagaaggataaaaaagatgaagatgtggtatcctagcaatgcctgtttaagacaagcaatgttgagtcatgattagagacacagatgccagaaccatgctgcctgcttcccttcctgactcagccactggccagctgtgtagtgccaaataagttgtttcacctctctgtgcagtggttttctgattcgtaaaactagaataatagcattacctatgtcacaagcgttttgtgaggattaaatgcaacaatgtctgaaagtacttagaatgtactaagtgctgattgtattgatggttattgttagtatcatgttccctctcccatagccgtacagaattacataatatgtgaccctgctctcctggtcacactgatttatgggaaccaattcagacgcctggctcagccaatcagaatccctctccagggagaattggccactccaacgtgcaagctaaatctgaaaaatcacgtgatgcgcgagcagctctgccacaatggaacgagggaagcggctggacagacaatcagaaggaatcagatatacatcaacaagcagagatgggaaaccatgcagctagacaggagagagaagggcagaactgcagcccacgtgccacagacattcatgggccatccgtagcacccagcccttgggttttctgagcaaaccttccttttaaaaatgcctttacaaattggcttatattggaagaatgtcattcttagaaccttattctaaatatccatggtcccctgggctatttgtttattcataatggagccaaattgtgtggatttgaaattgggaggacaagagtgggagagagcatccagctttcagttcacagcatgggatggatttgtggggaaggctttctagaggagataggtcttgagtgaatcttaaacacgtgatggcacagacagaatgaagggtccctttattgggagagaaaacccagcaagcataactcaggtgtctgttaaattaaataagcaaaaggccattggtctgaggctgtactttgagttgcttcgcagtgaactacaacctaacttagtatgtatacaaatgaaaatctcattaggagtatatattttttgtaataggatagctagatctcagtcaatcacaagcggctgagcttcaaccaatcacaggcagccaagcttcagccaaccagaggcagccaactgatcagactaagtccaaataaggtaaatgcctaactgtaaccaattaagctatttctatactttatttcctgcttgaatttcaaaaaacacggagctctctgaatgtcttctagttttgaatgctgcctaattcacgaagcctttaatgcttaaataaatttaaaaacattagaagaaaaaaacttcttttgaaaatcattttgtggccaggcgcagtagctcacacctgtaatcccagcactttgggaggccgaggcaggcggatcatgaggtcaggagattgagaccatcctggctaacacggtgaaaccctatctctactaaaaatacaaaaattaactgggcgtggtggcaggcgcctgtagtcccagctattcgggaggctgagtgaggcaggagaatggcttgaacccaggaggcggagcttgcagtgacccgagatcccgcggctgcactccagcctgggcaacagagcaagactccgtctcaaaaaaaaaaaaaaaaaaaaaaaacagaaagaaagaaagaaaatcattttgtatttatttgctcaaatcctacaagtacagattgaaaagtaagaaagtacagggcaggtagactcactcctccccagctcccaatcatttctctcttactaacagctgaatctcagttccattaggaaaaggggggtctttggtcctccacaacgcaaggatgccagtcctccactggtcagtagccctgactcacataaccagcctgtggagaattcagctgtctcaattggatagcaactcctcccagacagtatttacacaaggcgaagctccacactcattgtgtggtatccacaccatgtgtatgcatgtacgtgtgtgtgtgcatgtgtgcatgtgtatgtgcgtgtgggtgcatacaactgctactcagtaccatcctgagatattagatcaccttcgtgtatgtatgcacatgtgtgcacttctgtgcacacattgggggaaggggttttatacattttgagtagacaatatgtagatgactcaggctgcagatgctggttgagaaactgaactaaacatctgggatttcaagctcacaaatgctaaagacataagcaaagcagtccctgagagctgtccatgaactaacctgggtcatggtggagggtcctcagctttctcctagatcagtcagcaaacattcctgatttcctgtgcctggtctgagcatacaggcctgcactagatgctctccagtgagagttgataggggccaaaagaaaaatctcttctcttgcagacttttgattgattgattgattgattgattaagcagggtcccactctgttgcccaggctagagtgcagtggcacaatctcagctcactgcagcctccacctcccaggctcaagcaatcctcccacctcggcctcccaagtagctggaactataggtgcacgccaccatggccagctaacttttgtatttttttttttttttttcagtagagacagggttttgctgcattgaccagtctggtcttgaattcctggactcaagcgatccacctgccttggcctccaaaagtgctaggattataggtatgagccactgcaccttgccccttggggattttataatttaagagagggcagacagagaagacacacacaaattccctcaaatctaaggggctaaacacacactctaacaatcaccgacagttgcgcttgtttttgccaatgtcacaaaaggatcctactctgaatctcctgcagataccgcacagagagcaacagacctcggacgcaccacgagcaaattctagcgttctgcttgtgttttataggaacatcaaggagcataaagaattcttcaccaaaataaaaatgcacgcctggccccaggcttccaatgtgtgaaaactgacgtcagtgccttccctagtaggaaacaggagggtgtgaatgcctcacgtccttgtgaaagttaaataagccaccatttggtgacagccactaatgagtctgcaacaaggaagattagtccaaataaatcattacagagtatgatgcgtcgtgagcaatgaatcttcttgccgctcctggtaaggctagttcaaccatcacacccatcaagtaaaatgctagtgcgtgggaaaaggatgatcagttagcggaggcaattgccaagcaccttgtgggatgtgagggtgtgccagagtgacaagaacctcgtgaggtttcttgaaattggaaaggtttgggcacttttgaagtggagtttgggaaggaggagtagaggggggactatttcatttagggatgaaatagtcaatgtcaaactcagaagcaaaacaacatcagagacactggttaataggtaatattgggaacttatcttcaatgagtcctcaatccttacaaaagccccatgaagtagagattaatcccctttaacgaatgagtaaattgaagaacagagaggcagagtaactggtcccaggtcacacagccagtctgcagtggactcaggagtcgactcagcatctttgcctccaggagcccctcttttaactagggcctcatggttgactggggatgaagtggggggtggggtgggggtggagaaaaggctgaactgctcattgcttgccaaaaaaggtagtgggagcagttgctgccgtgagaaggagagtctggtgagctctcattgcctgtgaccagagtggggaaagactcaggagaaatctcgtatctataatcattcttacttgcagacaaacctgaaacatttcatgatagtagtatgtgttaacccattagacctactatttctaagcataaagtaattgcaagcagaaaatatttacccatgctaagcccacaacacaggcttatacttcttttgggaaggagaatgaagattctttgttgttaggaaaaaaaagttgcccatcattaaaattttgttttttaacttataattgagcatctaagaattcacacaaagaaaggacccactgccagggctcagcctctcatccttcccactccatctttcctggaaaagaaccacagtgctacatgaaagggtgaggacgacaataaaacagacagaaaagtcccaggctcacttttcccacggaatcaccaggtgatcttttctgatgcatccgcttccctgatttcctcttccccaaaacaaaggacatgattgtggccacaaaacatcataggatggagaaaagcagacacgggtcttgcgggcacaagcccaggggccatcagcaaaccctgctgcccaggtaagcccctgcccttcaaggtctggcttcctccctgcagagtggaagtctctgaagtcctctagtgaatggccccaaaccattttggatcagcaaccgcctttgaaagtacggcgaaagttacaatccagcaaaaaatacacagaccattttgaaataattgtcgggtccttatggattcaagaacgtcagactgagaacatcttgctagataaatgccaagttaacctccgttttcatagcccacgggcccaatcacaccagcaacacagaatgtatgtggtccctgagatggtgtaaccggctaaatctaatgggcccaatgatggaattgcaggcccccgatgaatatggcaatgctaattaacagaacactagccaagagagctttaacaacattcccatggtattattggagatgatttggttggattagcacaaatggcaaatcgtcatctgttaagtgcagaaagcatcaaatccctggaaaaactctttctaaacccctgttacaaaacaaaatgaagagtggccagcaacatatattcattaagtagtatgtatacacaaacaaaaccaaaggccaatcaaaagcagaatagaggccgggtgcggtggctcacgcctgtaatcacagcactttgggaggccgaggtgggcagatcacaaggtcagaagatcgagaccatcctggctaacacagtgaaaccccgtctctactaaaaaatacaaaaaattagccaggcgtggtggcgggcacctgtagtcctagctacttgggaggctgaggcaggagaatggcgtgaacccgggaggcggagcttgcagtgagccaagatggcgccactgcactccagcctgggcgacaaagcgagaatccgtctcaaaaaaaaaaaaagcagaatagaaggggatcaacttatattgtccctgccttcttgtttcccaaagaatcagtctagtttcaggtaacacaaattattatttacattctcatatgatgggaacttttggctatttctagactttttttcttataaatatcactgtaaaacctttaatgtatataaacaatcagaaattggacaaagttcccagaagttgaactgttgatcaaagggccatgatacaattccctaataaatttccaggaaggctgtgtcacttacccatgaacagagtttgcaagttctcattatgccgcttcttagccctggtatttctcatcttgaaataagtatatttatttatggggcaaatgacatttctcttaatgggtatttctttgactacaagtgaggtggaacatttttcaatttcaggcatatttctttcctcttttgaaagatgcctgctgcccaaatgaggcctctttaaataacagtaatatgattagctaattatttacagacactggtaattttcctgtgatccgcttaggtttgtcaatgagacctagctgggagtagcaggtattattatacatcagacagacgtatccacttggccaagttggagttttagcctcaaattttaaaattcctttttgagattcctcaagacattatagggctttaaaaaaaagtattacctgctttccttatggaactatgtagtatgatcctgaaagctaattttctcaggcaattgtctctttcaatattaaaactttttttttttcttttttgagatagattcttgctctgtcacccaggctggaatgcagtggcgcaatctcggttcactgtaacacccgcctcccaggttcaagcagttctcctgcttcggcctccagagtagctgggactacagacatgcaccaccccacccggctaatttttgtatttttagtagagatggggtttcaccatgttggccaggctggtcttgaactcctgacctcaggtgatccacctgccttggcctcccaaagtgctgggattacaggcgtaagccaccacattcttttttaaaaaactttcactttaggttcagggctacatgtgcaggtttgttatacaggtaaactcatgtcacgggggtttgttgtacaaattattttgtcacctaggtactaagcctagtacccaatagttactttttctgatcctctccctcctcccaccctccaccctcaagcaggctctagtgtctgttgttcccttctctgtgtccacaagttctcatcatttaacttccacttgtaagtgagaacaactggcatttggttttctgttcctgcattagtttgctaaggataatagcctccaactccatctgtgttcccaaaaaagacatgatctcattttttttatggatgcatagtattccatggtatatatgtaccatattttctttatccaacctgtcactgataggcatttaggttgattccatgtccttgccattgtgaatagtgctgcaatgaacattgatgtgcatgtgtctttatggtggaatgctttctattcctttgggtataaacccagtaatgggattgctgggttgaacagtagttctgttcttagcactttgaggaactgccacagtgctttagttcaacaacggttgaactaatttacactcccaccaacaatgtatacatttccttttctctgcaacctcatcagcatctgttattctttgactttttaataatagccattctgactggtgtgagatggtatctcattgtggttttgatttgcatttctctaatgatcagtggtgttgagatttttttcatatgcttgttggccacatctatgtcttctttcgaaaagtgttcgtgtcctctgctcactctttaatggggttgtttctttcctgtaatgtgtttaagctccttacagatgctggatattatatctgtcagatgcatagtttgcaaaaattttctcccattctgtaggttgtctgtttactctgttgatagtttcttttgctgtgtagaagctcttaagtttaattagatcccatatgtcaattttcacttttgttgcaattgcttttgggatctttaccatgaaatctttccctgttcctatgtccagaatggtatttcctaggttgtctaccagggtttttatagttttgggttttagacttaagtcttgaatccatcttgagttgatttttgtatatggtgtaaggaagggatccagtttaatttctatatatatggctagccagttatctaagcactacttattgaataggaagtcctttcccaattgcttatttttgtcagctttgtcgaagatcagatggttgtagatgttcagccttatatatgggttttctattctgttccattagtctatgtgtctgtttttataccagtaccatgctgttttggttactgtagtcctatggtatagtttgaagttcggaaatgtgatgccttcagctttgttctttttgcttaggattgttttggctatttggcctcctttttggtttcacatgaattttaaaatagttttttctagtctgtgaagaatgtcattggtagtttgataggaatagcattgaatctgtaaattgctttgtggcagtataggcattttaatactatcgattcttcctatctccataagcatagaatgtttttccatttgtttgtatcatctctgatttctttgagcagtgttttgtaattctccttgtagagatccttcacctccctggttagctgtattcctaggtattgtattcttctggggtcaattgtgaatggtattgcgttcctggtttggttctcagcttggctattgttggcatatagaaatactagtgatttttgtacagtgattttgtatactgacactttgtgtattctgacactttgcctaagttgtttatcagctaaagaagcttttaggccaagactatacagttttctagatatagaatcatgccatatgcaaacaggaatagtttgatttcctgtcttcctatttggatgccctgtatttctttctcttgactgattgcttaggccaggacttccattactatgttgaataggagtggtgacagagggcagccttgtcttgctctggtttccaagggaattgcttccaccttttccccattcagcatgacaagcatcactcttttcaaaagaagaggatgtacaagagcttctctaatcttctttccctcatagcttgggaattcttgtaaacaacacaggagttttgtaatcagtgcacacaaatacaaagcacctattgtggacaggctccttgctagggttgccagatttagcaagtaaagacaggatgcccagttatgtttaaatttcagataaaaccaagattgttttagtgtaagtattcccacatattgcatgggatctacttatgcaacaaggtgttcattgtttatttgaagttcaaatgtagcaaggtaacctgtatttgaactgacaactctacttgagcccctgaggggctcaaggggcacttctcctcttggagctgcagatcccgcttgggaacccaggcagggacaagggagaccaggacttcctgctccacagacccaatttagggaccaggttctatggagttgagcaagctgactgcactctaccctgagagcagccacatattcatctccatgtaaaatctatgcaggatgtgctacatgggccacgtgtagcccagggcaggagaagattccactggagaccaagaaaacttcatagaaagataactaaaatatttattatgggccaaggctggcggatcacaaggtcaggagatcgagaccatcctggctaacacggtgaaaccctgtctctactaaagctacaaaaacttagccaggcatggtggcacacgcctatagtcccagcttcttgggaggctgaggcaggagaatggcatgaacctgggaggtggagcttgcagtgagcagagatcgcaccactgcactccagcctgggcgacagagtgagactccatcaagaaagaaaagagactagacgaggagaggggaggggaggggaggggaggggaggggaggaaggaaagaaagaaaagaaagagaacacaaatcaaatgggatcgtggcaaacttttgccaaggtttgagttgaaggtgggtagtggagcatggaaagaaaaacccacaggcagcactatgacagagtagtcctgcacaacgatgggtgcccttggcagatcatgtttgcttcctgctagtttgctagtctcgccaccatcttcccattcacaggatcagcaaaagtgattcagacatgggatccaccatttccctcaccaggagtaccagggtagaaagccacaattgctgtgagtcccagaagtttccccttactcatctcttctgaatgttcattctgtgtgtgtatgtgtgcgagacagaatatacacatgtatgtgcccacatgcagattaaaagttgggcacagtttatgagtctgtcatttcctccagttcctctcctggggattgtcaatcaaatcaaaggatggtaggtgcaggcaggtgggggcacaggtggggacaacctaagttgctggcatgctggacaaaggcaaccagtcctcccagcaggcacagctcagggagacaagcgaaaaacccgtaccaggcttggtgcacgttcctcttttcttacttcttcaggattctctcttttcctttttctctgaggtattgacaaggaggactatcggtgtcattgcaaagaaagcaggaacaatgattctgggggactgagaacctgggccaactgcattcactcactgtaaagcagctgtttttctgcccatacatgttcatgcatcagggcgaccatttcctggttatgcatctttggggatgctcattgataccctctgcgcctcagtttatgcacttgccaaacgagggtaatagtattacccactctacaggattgttgtggagagtggatgagagtaggtataggacccatctagcacataacacgtacaacacaaaccacattctctagtttctgccacgaactagtattgcacttataaaaatataaaagaaagagtaatgtcatctagtacacctaatccattttaacttaaatccaaaagggcaagaggcccatggtggaggagaaaaaaattagattatgataagatttggtgcagaattttcaaataccatcaaatgccaattctccatgtcagcagagtgaaagcatgccttggctataatagcaacactttttaaaattccatgttcacgctgacattttcaaccttcagaaaggatcacccactgctaaagataatagagattttccatcaataaaaggaggggactgctgcccttcaagatagtctacactgctttggaatatgaagtcactttgtgttttttatttttaaatagtggatgcactcctctcatgtcgtttacttaggctaacactgacacaagtttgcacttcctaaaaaatgttgcagccaggaagatgggaataaagtaggtcgctagcatccttaaagcatgctggctggctggttatccagagcagactatgcttgatagacagattgacagacagacagatggataagatatatacacacagatacatgggtaaatacatgcaccatctatatacaacacattatatatatatatatatatatatatatatataaaatatatatattggatatatataggatatatatatacacacattggagattatatatatatatatatatatatatatatatatatatatatatccaatgctatttcattaagccattatatttctattttcaggctgatttttgttcaaaaattgtatatatatatgacttttagaaattcacttgagacattgaaacttaatgaaatagcatgagacagctaattgccaggaagaacaagcaccactctgtggtccatggatttgtccatatgaaatgaatgataataaaggaaatggtcaggaggaaaactggttcctgaaaaaaacaaaaaccaaaaccatgaatcaacccattcaaatgcagctcctagcaagggaaatacatctctttctctgccatttttttattgagtcaggggccattgccttttcaaaagatggctgtcttcttttaatgaatccaattagtgctatgccaagatgcccaagagacttaaggttccacacagactcccagtgcagggaggctaaattcttgaagcctctgctttctgagatggaagtgttgggtcagaagggaggctgacagacaaaggctgacctgaggttgcgtggagctaacagagccaagaaaaacgttggttctgagacaggaggaaaaaaataaatcagaaatcaaacagcatgggacttagtgaaatcaatatgaggacaaaggaggctgccctgatgttcaagaatggaccctgcttggtgaaccctaagaattaatggagcagagcagaaacgtttgccaggctgggagcatcctttcccatcctgttcctacttagacaaggaccacagggacacacaaagaatggcttagttcctaatggaaaacaaatgccattcagcaaaggttttgagaaggagcaaggtggctgctgagagctttgttttctttccatttcagctacgggcagacatgtcttgctgaaaaatgaaggtttgagaaatacagattgtcctagtgttcagatgagtactgcccactaaggttaaaaaaaaaggaccacagggctggaagatgaagaggcaattatcctcaattcaaccctgtggctcctattacacaaagaaaggtgggaagctgaggccacatgtgcatgcgggagcagactgtgagtagctgtatggtagaagactggaactgagcccagcccaagttaacgatattttacagtggttcttgagcttgagcatgcaaaaacaaaacacaaaacaaacgacaagaaaaccccacaaaagcacttggggagcttgagcaaagtgcagattcttggactccacagtagacccaggcagggcttgggagtctgcaggtctgactgctactccaggtaacttaattcagaggaggaagatagatctaggggaaaacacaaaggaaacccattaaaaataaactcctaagctgggctcccaagagcccggacctcttgctaactgtttagtggggatcttcacttgggcattatactctcattttacacaccttgccccaaacgaagcaaattaccttttgccaagaacatgttcctcttcttggaatctcttttaggatgacagattccataatctcccccatttaccaagccaggagcaacacaagagcaagtgtcagcatatgcaactcactctgacaaactctgttctcggaggacccaagggaaacccaaggagggactcagaccctagacactgggagagtgagtgtggaataacctgtgatggttctactcataaggctcccaaatccagtccaaagtatgtgagcaggaacccaatatcccacccagacacagccgcctgtcacgttttcttgaagtttaatattagagtctaccccataaaccacctcaagtggcaagttctgacctcctcactgacatctgtcccttattttgccactgcagaccagagtctgcagacagtcaggtcctggctcagtaagccttgtagaatcgcccatgccagaggcaggtggtaggggtgggctacagattgcagcgtgcctgctgccatggcaacgcacgagcaaccagggatgggaaagaaggtgctttacttaattgaaatccaggcaatgtcttaatacgaagctcaaggaagttaatgctcaattagattttctcctgcctcctttttcccctttccattcacgtcaccaaatgactttaaccatccctctctgccaccaaaacagaaaaacaggggaaaacccataaaacatctctaaagttgagtcactgtataaaccactgagactgaaccctctcctctcaccatactcaagcaaaaagcaacccaagacgcctaggttctctctgttcactgccaatccatctcaaaagaaattgtttgcccaaaggattcttaagactgcattggctttgccatcaccacctcaccggggccaccttttctcacactatgactacgaattacctggagatttaaaatgcatattccttgcctatgcatatatggacaaaatgcataaaatgcagatttcctggcctcatccaccagatagttggtttaggcaaatcagagacagaatataagcatcggctttttttttttttttttcctagcaacccggggaattctgatcttgtctagagccagatccaccctgtgagaaatgcagaccaaccgatttgggctttacctgcagatctgtccttcataggacaggctgagcccagctaaaggtggacatctaatggcctcaccaaataagccatgggctgtgaaagggttaaccggggtcccctgttactgcagtcgtgagtcccctaacataacgattctgaacaccatagatacacatggaaaacgtgtcttggggtcgatcctagccactatttctccattctgcaaggtggaacaggaaaataaacatgctcgtaatccaaaaatattcactgatgaactcaccacttataaaattagtcctcccactaaaaaattccctccctgcctaagagcccaacagaagtcctaacccgctgctccctgtcagtctgggtgattgtgaacatttgtttgtattttcatcttattgtggaatttgtggaaatgtcaagttataagtcttgaaaaagatacaagaagctccaggacatgatgcagaagaaaggctgttccctggccgagcccagaacacgaaggacccagctagggagtaaagatgaaagcatggctgttttgcaaatttaaattttgactagccatctatctgattccagcaagatgaaggataaagataaaccaaaatctccctctacaaacacctagaaatgatgggtgagatgaacagcaacaacaaaaaaatgttttaaatgcaggtacaagtttgcaacaaaggaaggaaatcattaatgatgagaaactagaaaccggagccttaaacaccaaaaccagttcagaggttgccttggggtgaatatgggtcccaggaacaggggcctgggtgttactgtccacatggaggtaaaggggaggccctggaacacacacaccaggggctgaaattttacaaatgcaagattcatggaattctgcccctatgcagacaggtgaaatagggggaaaaaattatgcaccaacagagagagacaaaaaggatgctcatatgtttctatgtggtctctgaagaaaaaaactgctcgaaaaaaaaaaaaaaaacaactttgggcctacaccttgcaaaggtcagggtatgagtttctactttctacattggctagaaaaaccccaccataaacatcaacataaaagctggttccagggtaacgaggctctcaaaggatgttacagaaacaaatgcaaacctactctaaaaaaaaatacgctcccatgatccaggacgctgaagaccctcaaggaaaaatgcagccaccagagaaggactgacgttaaaaagctgaaaggtctaagagaaatcagcactccatgcatgagagtcagcaggcaccaccgacagagagaagcagaacctttgtgtaatagctcttttttaaaacaatataaaacagcctaaccttattcaagacctaaaagaagaaattaaaaccaaaataaccacatacaaccaagaaaaaacagacgaacccactcgaacaactacaaaataaaatccacagtcatttctattgaaaactcaacagacaaattagatagtcggatattggctcaatgactaaccaatgagctggaggataaatctaaatcagagagaggaagagatggacaatatcaagaacagtttaaagcaggggtccccaatacctgggtcatgaaccagtatccgtccatggcctgttaggaaccaggctgcacagcagggggtgagcggcaggcaagcagttgaagcttcatctgtattgacagccgctccccatcgttcacgttaccacctaagctccacctcccgtcagatcaccagtggcatcagattcccacaggaccacgaaccatattgtgaactgcatatgtgagggatctaggttgcatgctccttatgagaatctaatgcctgatgatctgtcactgcctcccattacccccagatgggaccatttagttgcaggaaaacaagctcggggctcccactgattctaggttaggtgagttgtataattatttcattatctattacaatgcaataatagaaataaagtacacaataaatgtaatgtgtgtgaatcatcccagaaccatcccccacaacccccaggtctttgaaaaaattgttttccacgagacaagtgttcactttaaagtagtataccaaatcttaagataaataatacatagacacacatacaaacacacacacaatcacatcatactgaaactgaaaaccactaaagacaaatgaaaaaaaatgtatacacaaccagagagaaagacaaaaacttgaaatgaagctgctgctgtgtgcatttttataatgcttacagagaatgcaatgcaaagcacaaatcttcagatggatgaatgccaactaattagaataataagtgccaaaggaaatggacatttctattaacctacacatttaaatgcaatttgatttttctttcaaaagtcagagctaaatactttatttagctaactaactaaagcccctcacagatcctaaaatcccccatagattctaagtgaagagatattataagagaaatcaaaggcaatcaatttcacacaagaagcaatggtgagcaaagatattagcaaaaatgttggaaaatggaagcaaccattgattgtaaaatacaaacgaacaaaaacaataacaatactagcaactcatttgggaggtatcaaacaaagggagatactaaaatactggaaaagtagtaacattaaagcattctaaggtcctctgattggtagggaggaggggagagatgcagattaattttaaacaccgttattaggtcaactaggcaagtttaaagaaagtaaaaggaagccaggagtggtggctcacacctgtaatcccagcactttaggaggccaaggcaggcagctcacttggggtcaggagttcgaggccagcctggacaacatggtgaaaccccgtctctaataaaaatacaaaaatcagccgagcatggtggcatgcacctgtaatcccagctactcgggaggctgaggcaggagaattgcttgaacccaggaggcggaggttgcggtgagctgagatcgcgccactgtactccagcctgggcgactgcgtgagcctccatctcaataaacaaacaaacaaataaaggaaagggagacacagacaagatactgaattgaaaacttccaaattaataaagcgtaagggggataaaaagaggaaaataaaaatcaatcaatccactgaagtactaaaaaaggaaaaagaaaatgcatggtaaataaaatacgaggaaggagtataaatcttgagccaggccatacccacacacaagaaagggctgttcctcaagacagcccctggtgtgttgaatgaagtgcgcgcgcacacacacacacacacacacacacacacgcacacacacctatgcacaaacacactagacccagatggtattaatagtgttaaaaaaattaattgaaacactattaggctgagatgaccctagtgccttgggatcctacataagcaaaccaaaacccaactcactgtaaatggtaaaacaaaattgaagcttagccaatcagaaactgccaactaacctctaactagggattttccactttaaccaatcagatattttcttagtcttgcttcctggaacaccttatagaagttttcctactcacacaccctgggcaaagccctgatcacttgtggtttaatactggccaattcatgaatcgttcgctgctcaaataaactcttgaaagtttttatgtgcctaaatttaacttttaacattggtaaagaccgtcttgttatagaggaacaaataatccccatcccatgctaactattccagagaataaatagaaaaatgaggagagaaagaaaaataagtaaaactccccaactctgcatgatctggatgaggttggtataactttaaccttaatattcagagggaaaaaataataaaagcaacaatattcaaaccagaggaatgtaacataagaaataagttttaggccatgctaacttaagaacatagatgccaactgctagaaataaaaaggataatagcatctatcaaaaatgtgtctacggaaaatcttcagtaaggctgggcacagaggctcacacctataatcctggtactttgagaggctaagtcaggaggatggcttgagaccagtagttcaagaccagcctcggcaatatagtgagcccctgtctctacaaaaaaaaaaaaaaaaaaaaaaaaaaaaaaagaaagaaaaaattagccaggtggggtggcacatgccacaggcccagctacttgggaggctgaggtgggaggatagtttgagcccagaaggcaaggctgcagtgagccatgatcccaccactgcactccaacctgggtgacagaatgaaaccctgtctcaaaaacaaaaaaaaaatcttcagtaagtattatatgaatggtaaaaatgtagaaatgttcgctttagagttccacggatagacagaactctaaagatggcacccaacatttgcctctctccctgcctagagtacacactttgcataatccccatggataggatgaatttcactgctgcgaaactcagctcagctgactttaagacagggaggttagccaggtaggcctgacctaatcccatgagatctttaaaagagagagctttctccagctgatctctgaaaggaagtcagaggttcttctgggaataaggctcaggcatgagcctttgaaatggacatccccaaataaacgagccccccatgttgtccttcccaagtggcaccagtgaaagtaacaagaagcccagagaacatctgctgactgaggaggccccagcttttgacaaggtgtccatctggaagcatctgggacagagtcagcttctcaaaccttgtgcatgttaaatacggaagcatggtctccttccccagagaatctggtactacgaataagtgggaaatgcatttttattgattgatggatttttatttatttttgagatggagtttcgctcttgttgcctaggctggagtgccatggtgtggtcttggctcactgcaacctctgcctcccgggttcaagcaattctcctgtctcagcctcccaagtagctgggactacaggcacccgccaccatgcccagctaatttttgtatttttagtagagaccatgttggccaggctggtttcaaactcctgacctcaggtgatccacccacctcggcctcctcggcctcccaaagtgctgggattacagacatgagccaccacgcccagtgaatttttaaaaattgattttcataatacaaaaagcacatagagaaaagaaactggcatgtaatccccatgcccggataatccctgctgacatttgaaagcacgaaagtaacacatgttcgtgtttaaaatgcaaatagaacagaaaaagctgaaataaaaaccagaactgtctctcccctacccccaagtatttcttcccacaaataactggtcacagattttaatgtattcttctagaaaaaaaatattataataccagggcatatgtccttctcaacatttctaccccaaaggaattagatcgtatccagttttgcagcttgctttttttttcttcttcttcttttttttttgtttagcataacctgtagatttttctacatctgcatttttaaaaactacctcattcatttaactaggctcaaggcagggaaggaatcccatttttaatcagtgcttaaggtgagtctaatgtgcgaggtcagcagaccacactgagaaaccctgatctgagacaggtgtatgcatgtggaactctctggtttctatgccaatccatgctaaggtcttgggaatgtcctcttcctctccctaacaagcagaggcccagattatctctgaacatcccagatttaggtatgctgtcccaatacaaatggagaaatattcctctccagactgtgtttatccacctgcaagggtctcatgataacttccaggagttaggtagcatgagatagaaaattattcctggcttcactgctgaaaacgggtgccctgcggcaatgtgttcatttgcaaagcatcttcgctagactcccaaattgccactcatccattttcaatcttaggtcattgccaaagcaaagcaagcagccaagacctggtgttggtctcatacagccccagatgctctccagatgcagagacccctctccccattcctctacaggccacgctctcctgcagatttgtggccaattggtaagtagctccaagataatgttgctacggatttgcctcaagcatccttttgcagtcttacttatcttttaactggaaaaggtttgcctgctaatgagcctatgttatccttcatctaattatctttggcaatcccctcttccctggctgccgcaatgttaagggccatcagtcagagatctgcaggtggagaggtatgatactgtgatagaataagaattacatattttggtcttcatcttgattcctgacacagagctcttaaaatccttgtacatttcctaagtgataggaacaataaaggaataaaggagagtcttttgttattcataacaagcccttttctggtttttggttttttttgtttgtttgttttgtttttgttttttttttttttttggtttttctgagacagagtctctctgttgccccagctggagtgcagtggtgcaatccaggctcactgcgtcttccgcctcccaagttcaagtgattctcctgcctcagcctcccgagtagctgggacttcaggcatgtgccacaatgcccggctaatttttttgtatcttagtagagacagggttttactatatgcccaggcttgtcttgaactcctgagctcaggcaatccacccacctcagcctcccaaagtgctaggattataggcatgagccactgcacccggcctataacaagcccctttcaatcacacctaagtttacatgtgtgcggtgccttttggaaagcccttaaggatggggggcgctgtttgccaggggaaacaatcatgagattagagagttgaatttgggccccacacccaaacctggcctctggggaggaggagagggcctacaggttgagttgatcaccattggccaatgatttaatccatcatgcctgcataatgacccatccataaaaccccagaaggacggggttcagagagtttcctggtggctggacatgtggggtgctggaagggtgacatgtgccccatcccccaggccttgtcctgtgtgtctcttctacctggctgttcctgagttgggtccttttataataaattgattacctgtaagtaaattgttttcctgagtcctataaaccatactagcaaatgatcaaacttgaggagggggttgtggggacctctgatttaccctccagttggatgggtgagagcctggatctgtaattgttgtttgaagtgggggcaatcttgtgggatgtagcccttcatctgtgggacctgttgctgtctccaggtacacagtggcagaattgaattcaattgtaggacactcagctggtgtccttacaaaactggagaattgcttggtgtaggaacactgcacacatttggtcacagaaacgttctgtgttgagtgatagtataaaggcaatgatttttcctatacaagaggtaaagagagtaatgtctatgatggtgtctgctcctgtcccagtgcctggggagggcaggtgattccaacccagcaaagtcccaggagtggagggagttggaagccaagacccacatccctggatttacagaccctctggggtgtgtccctagcttgccacccacagcgcatccacatcctcacacatgggaaaccctaggatacagctgagctccactctgatccccaggggcgttggaaggtcatcagggccagatgggtacaaaccacccaactctgccagattctcagattcgacagacgggtacaacccacccaactctgccagattctcagactcaactggtctctcgaaataaggatgtaacaacgtgggggcagtggcgtagctcctaactggctatggcaccgaaaagctgatgaaactgcctttgcgaaaattatgacagtgatagaaatcttacatagctgatccatcttgcttctaacctcataagctgtcatccctggacataggccaagctagctacaggaggaagttagtttctagtgtaactttaaaacaaagatgataacagtcccttgccaaaactaaccaccccctccgttgtggggactgaaactgtctttgtaaaactaaccaattggccaccaggttagaattatggttcaggggcgggtgcagtggctcatgcctgtaatcccagcactttgggaggctgaggcaggtggatcacaaggtcaggagatcgagaccaccctggctaacatggcgaaaccctgtctctactaaaatacaaaaaattagccgggcgtggtggcgggcacctgtagtcccagctactcggaggctgagtcaggagaatggcgtgaacccgggaggcggagcttgcagtgagccgagatcgcgccactgcactctagcctgggcgacaggggcaagactccatctcaaaaaaaaaaaaaaagaaaaaaaaaaagaattatggttcaggactcatatagctggaggttacaagatctataacctccccagttgctcctattcttaacatcgctattataaaacctaagactggtatttgaggtgtttttcagacctcacgttctgatggaccggctggcaccacctggatgggaaacctataccaagaaactgactcagctgggtcctgtgacctctacccagaaattgattctgcacaagaagatagcttcaaccctctgtgatttcatccctgagccaactaatcaccttatccatttcctagccctctgcctgctaaactacccttgaaaaactctagcctccaaatatgtgaggaggaggacttgagatacatctcccatccttccaacttggctggccctataattatcaaactctttctcttctgcaactcttgccattaagtgtttggcttttctgggcatcagtcaactgcactaagaaagcaggtttgcagaatgaagagagctgatggaaaacagaaaaaagagaccctggtgggaggcaaaggagaatatgtgaacacgtgccctcaatttcccaccccctgactctagcaccccatgagactcaacttagcacactgcccttggattgtttccttggaatatattctgccttcctcctttagctggtctgaactgggtttcgctcccagaaacggtttggctctgtgtccccacccccacaacaaatctcactttgaattgtaataatccccatgtgtcaagggtgggaccaggtggagataactgaatcatgggggcagtttcccccatgctattctcgtgattccttctcacaagatctgatggttttataaggggctccccccacttgctcagctctcactctttcttgtgctgcctgtgaagaggtgccttccaccatgactgtaagcttcctgaggcctccccaggcacgctgaactgtgaggccattaaacctctttcctttataaactacccagtcttgggtatgtctttaatatcagcgtgagaaccgactaatatactcccttccaaccacaggcacccttccttgatgaagacaaaaccacagttgcaataaagtcttaatggttgacagtataataggagacaaggtaagaaatgatcacttaaatgtttgccaagggaaagtaatcacctgggactggtgagcataaatgatttttgctccaaagcaaagagaaaatccagagtccactctgggtttcctgcccgatgtagaactgtctctgttccttctctcccaccccggacatgcagttccctctcatgattttgtgggaaagctccatcctcagctaggatggatgctctgtggacaagaagctgaggcgtccatctgcaaggctgtcgcagggatgctgagcaaagctgacaccaggagggaggggaaaaccccgctgctggtaattcaaggtcctataatcttctcccattttgcaggtgaacagcctggtataggagcctgaagttatcggtccagaaagaaaatgcaggttcctgtctcctgtcaccttcaaaaccttgcttccaaagaaatcatcagggaacaccctgagaggaaagagcgagccctgaaaaatgagcagaagtatccttgatggagaggaggaagtggtagcaatgttgggttttgtctgtattggccatagccagcaaaagcccattcccctgtcccgctctaagaagaaagcacagccagggcctccaacccaactgtggacaaaggaaataagacaaagattgtagagtttgggacccagtcattcctcgttctttcccactgaaaactgagtggaatacattttgtaccccaaatgaagctaaagaatattacagtggctgcaggttgaataaactgggggaaaggagggagagaccagaaccaaaaacactcagatgggcaaatatatctcaaacacagcacgagagaaacacagggagtaaatcacagcaaagagagaaaaagaggagacagggttattttgggaagaaaaaactggtgcaattagatgcagaaataacattttcaaaggggaggaagtcacaagaaatgtaaggaagtgagctgtgtatattattttaaatcttgttcacattaacactgtaaatattccaattaattcatcattattgaatttgccagcaaggctaagggtaaaacttcagcccaaagtttaattataccgaggcagagtggagcatttttcatgtccccaagaactgccaatggagaaagatgaagctttcataatggccagggtgacagccacctttctgaacacagctgttacctacctgaggacttcccaggaagccagcgggattctggaaccccctgaggttgtccagctaatttgcaaagtgagacagagttttatggaaaagctattcaaacccactgatgccaaatgctccaacaatctgtccacccttcccttcctcatctcccacaaaggcacccatggctgtgcatgtttatgcgtgtgtctgtcatcctacattcatgtggctctggttgatttcccagttcgcatgcatttacttattaacgatgatctaattcggagtcattgtttcttttctaatctatttctttcttttcccttagagcactttcaatgcttactgtgtcagaccctccttctgaggaaggaggtgggacttgattccaaaggcgaggctcagtcacgggaccaaactgaggactagctaaaacaggggcagggtggaagcagctttctattagacatgtccacccagtgtgccatatcagcttaacactgccatggcaacatcctggagctaccacccctttccatggcaatgacccaatgacccaaaagctgccacccttttcctaggattttctgtatataatgccccttaatctaaatgtaattaaaagtaggttataaatataactgcaaaactgccctgagctgctactcttgtcacactgccttatagggtagccctgctctgtgggaccagtcatgggagtgtcaaagttaaacctggaatgtttccttcttgtgattttgggacataaccatgctctgccatgcccaaaagcctccatcaagatcaatgggtggaaacagaaattggattatggtggtcaaataaaaaataaagagctattgtagaatacttaggggagaaatgggcaatggtcaaatgcttcatatcccctggccccaaagccaaagtcaagtacaaagaagccaaggaagcatgttgttaagttccaaaagtttgtctctgcttgttagaacatagtgctagcaagatcacaatcacaggaacttatgaaacaggcctaattgttgcatgaaactgatatttatggtttcttttgaataaacacagaaatggaccctcccagccttaaaacttgagaaagttacattcgtcttatctgagttcctttctcagaaaaccaaccacctagtgcctagatagtatcatggagctgaaacttaccaatcactgcatctggacaatgaaacccctcacctgtcatgatcacctaactgatcatgtgcttcctattgaccaactcctctactcctccctaattcctgtttccccacacatggttccatttcttccctgctatataaaccccctaattttagtcagttgaagagaaggatttgagactgacctcctatctcctcagctgcaacacctgattaaggcctttcctggcagtacccactgtttcagtgattggctttctgtgcagcaagcaacaagacctagaccaaacccctggtttcagtaacacttagagcctacagaaaccactccaatttccctgtgcccacaaccacaaaataagctcccaggccctagccaggcacccagcaaatgcaggtccttggctacaaggtaggctaagaaaaaatgcataatgtaggttagtgtcccacctgggttagataaaatctaattaagcatcatcttatcaaaagagccaaaagaatcatcatctctataaagaagggcaccaacacacacacatacactcccttttctttagatcattgtaagcctcaagttataaaaaatgatggtgtgtgttaggtgtgtgctttggagggaaaatgccagaaaaggctttgtgatcaaatgttcctgtctttccaatctaactgcctttctctctcacctctctttgcttcaagaacattcatgacactgggtctctgaatagtaattcacaaggcaaaattattggcggctttatattacagcccattttcctgactcctttgaagggtgggcaattagaacctcaaacacaattttttcattctggccagtgccacgttaaaatgggcaaaaagcggggaaaatggcctcaacctttctttcgcaatcagttcacgatgcttgattgaaacctaccaattacttttccccccatttgctcatgagaggtaatcaaggtggaagaaaaatctgaagctaggagagacagagaaattgcaggcaattttcccagtgaaagggctttctctagctgcctgattctgatgtccctattaggagctggctgaacatggtccatggtctcacgacagacttggagagaccggggacagcgtgctttactctggcgcctcaggtccagagcacgtgatggcactggccttcatcttcatttttatttttttatttttatttattattattattattattatactttaagttttagggtacatgtgcacaacatgcaggtttgttacatacgtatacatgtgccatgttggtgtgctgcacgcattaactcatcatttagcgttaagtatatctcctaatgctatccctcctccctccccccaccccacaacaggccccagtgcgtgatgttccccttcctgggtccatgtgttctcattgttcaattcccgcctatgagtgagaacacgcggtgtttggttttttgtccttgcgatagtttgctgagaatgatggtttccagcttcatccatgtccctacaaaggacatgaactcatcattttttatggctgcatagtattccatggtgtatatgtgccacattttcttaatggcacaaggggatctctcctttccagaaccagggcagtccgtccctagagggaccttgactctgtcaaccgacactgtcaccttctgctaccatcttggaaagggtatctggatgtttcacttctcttggggatttccagaaaaagacagcccattagggtattgtcttcatgtattttaggaaaataaacaaggtccccagccccaggggccttcttgctgtgaacacaccaagcttgttccaacctctgggcttctgttcctgtttttctctcttggcctggtattctcttcctctagacattcccatcataacggcttttggccaacatccttcagaccttactcacatgccatcttctcagtgaacagtctcaatatcccacttaaaacatcaacatcccctacaccccctttattgctgtatttttctccatacctgtactatatataggaataaaatcccataatatttttccctactctcatataaaaatcaacacagaatacttctatgacctctggtcaccaaactgtatggggatttctccccaccaacatggagtgggggtaattcaattcaatccagacactatctacctggaggtagcatcagatcccacaggtgaaggctcagtcccaaaagactgcccatacttcaggtcaattgcaagtagtaggttgtcacctatgcttctgactgatccactataaattggggttcacactagaccttccttgggttcaattaatttactaggatggctcacagaacccaaggaaacacttcacttatgttcaccatttattacaaagagtattttaaaggatacagatgaacagccaaatggaagcaatgcatagggaggttatataggaagggggcgtggagcttccacgccctttccaggcacactatcctccaggaacctccaagtgttcagctatcaggaactcatccaaaccttgccctttgggttttttatggaggcgtcatgatttaagcctgaatcattaagtcattagcccagaggtcaggaggtgagattgaaagtcccaaccttctaatcatgccctggtctttctcttcaccagcctccatcctgaagctatctaggggctcccagccaccagccatctcgcttccatacaaaagatactcttatcactcatacaaaagattctcttatcaactccagagattccatgggttttaggaactgtatgctagaatgccggaggaaaaccaattatatatttcacaatatcacagtatcactcactgctatctagtttctacatgctctttttacttcattatcatttctgctgcccaaagctaacacaagctctgtgaggacaggaggttttgtctgttttgccgtagtgttactaaaaccaccctcacagggtgaacaagaatgacaagccaggctttaggcaggattatagttaggcatgaccagggtgccctggtgtacttcaacccacttccctgcagctgctgagtgacaggtagcatgctgaccacctgccctcccattgtttctatagataaatctctcaccctagacctttttacccaagaattgcttcaggaattcagaaattccagtgaaactggcaaatgccacctggtctgaagacccccgccaaggaaccgactcagcacaagaatgtggtttcttcagctccctgtcccatgacttcaccctacactttctgaccaatcagtgacccccacattttaccccatcatttgtccagactccttaaaaaccccatcctcaaacctcttgaggaggctaatttgaggtttcctcccatcttctcattcagctaccctgagatgattaaactctttctctgctgcaactcctgctgtttcagtgtgttggtctgttactgcacaatgggtttaagagcatcctaagagctccctactcctcacacactgcctggcacatagcaggggctccatgatctgtcatccatcatccatcacgatgtggggaatgacagaggacagcaaagtacgccccactcttcatggggtttatgaagaagaaaagaacttggggctgggcatggtggctcatgcctgtaatcccaacactttgggaggttgaggcagatggatcgcttgagcctaggagtctgagaccagcctgggcaacatggtgaaaccctgtctctactcccccacaaaaaaaaacctgttgggcatgatggtgcatgcctgtggtcacagctacttgggagactgatgtgtgaggataacttgagctctgggaggcagaggttgcaatgagctgagatctctcaactgcactccagacctgtctcaaaaaaaggaaaagaaaagaaaagaacttggtattgcagagaggagacaagtaaatgcaagggaaaaattgggagaggggactgcctctcacctcttaaaacagagatacccaagttcagatacatggctttttttttttctttttcagacagagtctcgctctgtcacccaggctggagtgcagtggcataatctcagctcactgcaagctctgccttctgggttcatgccattctcctgcctcagcctcctgagtagctgggactacaggcgcccgccaccacgcccggctaatcttttgtatttttagtagagacagggtttctctgtgtaagccaggatgatctcaatctcctgaccttgtgatccgcccacctcggcctcccaaagtgctgggattacaggcgtgagcctctgcacccggcctaagataaaattataaagactgaccatactaagtgttggtgaggatatggaggagatggaactctcagatgctgctagtagcaatataaaatgccaaaagcacttcggaagacagtttggtagttacttaaaaagttaaaacatacacctaccatacggtccatttcactccttggtatttatcccccaaaaatgacatcatatgtccacacaaagacttgtacacaaatatttgttgcagctttatttgtaatagcctcaaactggaaacagccaaaatgtctgttctgcaagtgaatggataaagaaatttggtatatccataaacaaaatacagcttagcaataaaaaaaattaacttgattgcagtgatggtttcccaggtatgcacatatgtcaaaatttatcaaaattgtaccatttaaatatgtgcactttttgtacgtcaatcatacctcactaaagctatttaaaatgtctgaaaaattctgggttaaataattttaagtaagtttcttttctgtaggatttccagagcctctaaatgttaagtgggtattattactctaccaaaagagaatatgatatatgtcatttcccaaacttattcttccacaaagcctttttaaaatttttatttttttttactaagtagttcatagagctggcatcccatggaacacgttgcaaaatacgacaaaatctgttcttgatttggacatttctaagtggcaaatgacaagaagacacctttaaattgtcttcaaaacaagagagctccccaatttataaaatctgctgtagcatatgtgaaaacatcccagttgcctgaagaaatgtgtatgtttgcctcacaggctgcagaatttctttagcttttcttcggcagccacagatcaggcttatttattttcttcagttttactaaatatgaaggtgttggccaggatttattggtctgttttatttctccatcccatgacatctgctagaggtggttgttactgttaacaataatgctactaaattacttgagcactccagaatatgacattctggggaaccaattaaaacagatgctctttcggccgggccggtgtggtggctcatacctgtaatcccagcactttggaaggccaaggtgggtggatcaccagaggtcaagagttcaagaccagcctggccaacatgtcgaaacctcatctctactacaaatacaaaaaactgtagccaggcatggtggtgcacgtctgtagtcccagccactcgggacgctgacgcaggagaatcgcttgaacccaagaggtggaggttgcagtgagccaagatcgtgccactgtactccagcctagatatcagaatgtacatattcctatatctaaaaaaaaaaaaaaaaaaaatgctctttcaactttctttaggagacacaccacacgcatgcacaatccaagacacggagaagagaaatgctcagaaaatccaagtacgatgattaggaagctttttctgaactcagcaactatcacagaacattgttaacttcctggctctctgcaaattttctttgactacttcaggaccgaatccaagagttgcagccctacacagattgtctttaaaccatagaattcagctggcccgctctgctactttattcattaaagccactctatgcaactgtttaacctagtagtcttgagtttcatctggaactctaatcattggcaaggaaagtaacacctgacttcagcagtattgggtcaactgcttttctcaattaaactcacacaacctgcttgagggagagagaatgcttctttttttttttttttttgagatggagtctcactctagcttccaggttggagtgcaatggcgcgatctcagctcaccgcaacctctgtctcccaggttcaagcgattctcctgcctcagcctccccagtagctgggattacaggtgtgtgccatgacacctggctaatttttgtatttttagtagagatggggtttcatcatgttggccaggctggtctcgaattcctggcctcaaatgatccgcccacctcggcctcccaatgtggttggattacaggctgagccaccgtgccaggccgagaaaatgcttttaggtggaattatcatgagggttcatcacgcagtcctgcatccttaaggcatactggcctaacataagcatgggcgcatgtgagtggaaagtgcataaaacacagccaagtccatattctacgcagagcaggcctcctactgttaacacatgtgcactggagtctacctaccctcacaggcctggatgttactatagctctgttttctcagtatgcttcctcttcaaatcctctgtaaccacagatggctgctgccaaaaacctggatgaaaatcacagagatgacccagtgcagcgccatctttatgactgaaccagttgaggtacctcctgggtagtatttacatgatgcaaaacatgctcaagcatcgccagtactgaagcttttcaaggtttcatggtggcagaagctagccagttaattacacggaatctgggaaggcaggttctagtctctgttctcccggtggattgtgtctgattcagggtcaggtgactacaatttctgaggcttgactgagaaatgaccgaggaatcccattcatttgtaagggagaaacagccaataaaaatgtattcttgtctcatcaaaaagacttggtccaggggaaagccatgaagatggctattatacacacctccatccctccttattgtggagggaaggggatgcaatctgtataatatcatagtgtgaaaactgaagttgggcccaagtagggcctggtctttaatccaattctgcccatagaaaggagaatctgggctgggtgcagtggctcaagcctgtaatcccaccactttgggaggctgagacaggtggattgcttgagctcgggagttccagaccagcctggaaaacatggcaaaactctgtctctacaaaaaatacaaaagttagctaggtatagtggcgtgcacctgtggtcccagctacttgggaggctgaagtgggaggatttcttgagctgggaggtcaaagctgcagtgagctgtgatcacaccacaaaactccaggctgggtgacagagtaaggctctgtctccaaaaaaaagaaagaaagaaagaaagaaaccttataaaggaccacagtgcccctgggcctgctaggctgcccacagcttggctcacaaaagcagcgttgtcactgtggatggcctcaggccatgttggtctttgtactgttgcccagccatttgcagggccagtgcactattctaaatttcatttcaaacaatgaatcctcagagcgttcatcccttccattctgttatctactgcagtgcaaggctgtggctcagaaagtctttagcttggaagacatctagctccattaaaactgcagcaattatgactacctggaggtgaataatctcctcttggctttatttaatgttcaatacaaagaaacagtcaccccattaaatttacctgcgctgtgtctcgctttggatttttcaggtagtcattggttctaaactatcatgttcagtatcttaaggaccagactatattactatggtgaggcagactggcaggaaagctctgggatctatcttgaacattagagtttaataaaaaggaaggcatgagataaactgaaaaatataaaataggaaatcgctgcagcagcattctgcattcttgaatagaaagactggaaaccttaaagctactaagtcttttcaaatggatagctttaacataattccactcaaaatcacaacagaattctaaaactggacaagggaactctaaagctcttctgaacaaagaaaaatgcataacgagaggaactcatcattaaatataaagtggtaatattaaatgagtctttcttgcagtaggatacttaactttcttcagatttatcatccctttaaaaggcctgttttgacaaaggggctggagcacttgaatgatttgtgtctatgtttctagagtaccatcaaaacacagcaattcttatccacttgtgtcaaggacttctgatgatacttgtaggttatcgaaatggaagatttcctgtggactaggatttggattctaaaaatcagcttataggttttccctgcagctccagacagctattcctcagtttttgcctcctctctatattggaattaaacagcttcctatgaagcttggaacgtcaacgctttctgcatactcaactccagtttcatacttttgcaaatcaagcattggttctgtgcagctgagtctattccaaagcgagtaataatttgattagtaattttttacaactctctaatcctgtaggctacgggctcacctcttgcaatcacctagttcccacctagacccatcctgcattcactgaagattccagcagcattattcaggtgccactattcatgtagataagccatctgcctcacctccaatgaacctgtcctgtgcaccatctcaaccaactaatcccaagggcactacttatcagatctacctctaaaatctcaatggcaggcattccaggtgttgaaccacctgcctgctatatttatttccagctcctttcttgtgaacgctggatccagttctttagtaccactggcacctctgtgccattggcccagccacctttttactccaacctcccacctatgtccacacttcccccctcatcaagcagtggccctcgctagagccaccctctagcaaatacctacacatatgcctacttaatgccgactctccatctattctgcacttgtcgccaaagagttgaatgtaattggagagaaacctactgccatgatgcatctccaccattctactgagactgcttttgtcggggtcaccactggtgcccatgtggcccaatccagtgctcccatctcagatctcagcttgctcatcctttcagcatttctttcacatgtctagtcaattcccctctttttgaacatccctcatttggcttccaagaaacctttctcccccagtattcctgcatcctcactggcaacacctctgctcagttccctctgctggattctgttccacttcccgatttccaaatggaggaccctggtgctcggtcctcagtgctcttcgctctcctgcctacacaggctcccctgggcaatctcaaccaatctcatgactttcgtcattcccaaatttatatctccaaccccaatgtcttccatgaactccaaagtcatgaatccatctgcctacttgacgttaccacttgagtattcagaggcatctcagacacagaacttttgttcttccaacccaaacttgtttttctccagccactccctgtaaatcactcaatcccaaaggctaagaatcctcctcctcctttctccttctctcagagtccttacctatccgcaaatcccatcagctcaacattcaactccgccactctttctgcagctcaagctatcctcccccactacaaacgcatcctccaaactgctgatctggattccacccttgtccgccagctcccagaatctcttctccacatagccacccaaacaatactttagaatgtgtgtcagctcatggaactcccctgaataaaacctcctgatggattcctgtcatactctaattgagatctgaaagtgctagtggtccctgcccgctggaacacttgctggacaccagcctcttgactgtccctcaaatacaccaagcacctacaagctccagggccttctcacgaatgctccctgtgacccggatgctccttctgactggagtgctccctcctagggtgctccctctgaccaggataatctcttcacactcactcttggcattttctctttcacatctttcaggtcttttctcaaaacccatcatcttacaggggtcttccctgactgcctgatctaaaataacagcccagtcacactttcatcccagtaccctgcttttctttttccctgcagagccagataacattaccttatgtatctttgtctattatctgtctcttccactggactataaagtcctgtgagggcaggagctttgtctttttgggtacactgatgtcatcccagagttcaggatagcacgaatcacacacccatcagatgagtgagtgaatgaataaatggatcagataatgaatgaaggaatggatcaactggctatcaaccgcagtggaaagctggacccctggaaaagtctacctcctccagtctgtatcagaaaggggctatgcaacaggacagagaaagtgcatcgaaactccgttttcaagccaatgggctcaaccacactaaggaaacagccgcaaagatgaggagcacttctcccgagggctctgccttcttcccctttcatctgcatcatctttcttgtgcctgtgtatgcagtaggtggctttgaaaggcagagacaaatgtcagaatgcaacactgcacagttcttattgctttcaacagtttcccgtcttccgtcataacgagaacagtcgcagccatgctataattttctgtttaggtaacatcttatttgcattctgaaaccatgtcctttttcctattactgatataaaagattgcttatttctaattatattgcaggcattcagggaattcaaagagcagaaaatatgtcaggaacaatttacaaattgtggctatttgtgtacatgcttgcctggactccagcaaatttagaaacgaaaaaaaaaattgcttattaaagtgccatctctcctcagcagatctctgcttctatttgttctctcagtcctaactaaatacaaacctaaaccctaagtgtgaatgtgcttgtgaagaaaagtactcttccccacttctcaattgttttcaatgagaatttcgaagtgatattttccccactgctcccatcctgccttggaaattccatttctctcacactcaagtcattatttctaaaaacaaaacaacaaaaagaaacacacatttttctgtttttgtgatttgagatgtctcaagagctagaaaattcttcccagagtcgtatgagtcagtactgaataactattccacagatattaggacgaacatactgtgcatgaggtggagaaccttcatactcaaaatgaaaccctgagtctaaacttattttgttccacattttaagctcgaataaattataagaagcttgaagatgtaaaatatgccttctatttctttggtatcttgccacagtgctaaggaaagaacaaacatacagaactttcaacgtattaattttcaatccaggaaccttcatagatctgaacaaagccactcaaaagagcctaaacacatggctctacctgatcccaacagatggggttagtggttgattgtcaacagttgcctgcatttatctcccaaaaggccttctggaacctcttccctgacctaaatagagacgcttctaaacattttagaaggcatgatcttttcagagtcccatgcaacaacatcattttgcctactcgatcagctctaagcttatttcatccaagataagtgttgaggccaggtgttgtggttcacacctgtaatggcagcactttgggaggctgaggaaggaggatcacttgaggccaggagttcaagatcagcctgggcaacatagcaagactccatctcgataaaagatgaaaaaattagccaggcatggtaacgtgcacctgtagtctcagctacttgggaggctgaggagagaggattgcttaagcccatgagttcaagactgcagtgagctatgattgtggccctacactccaatctgtgtggtatagcaagaccctgtctctcaaaaaaaaagaaagaaaagaaaaaacgaaagtgtagacaggagtaactagatacagttgcagagacatggtgtgcagaggtcaaacatgttcataaagaggcctcagactcaagcaaaattctactattgcccaaataaactctgactctgaatacagggcaaatctctatttgcccattttaaaagggaggttcgatcaatgtgaatttataaacgtttagagatgcagatatggataccaaatatctattagccatacttaaaccattaatttagttacagatgtgtatttaaaataaaataaaatattatataaaatatattacatggccagatgcagtggctcacgcctgtaatcccagcactttgggaggccaaggcagatggatcacctgaggtcaggagtttgagaccagcctagccaacatggtgaaaccccatctccaataaaaatacaaaaatcagctgggcatggtggcgggcacctgtaatcccagctacttggaaagctgaggtaggagaattgcttgaacctgggaggtggaggttgcagtgagctgaggtggaggttgcagtgagctgagatcgtgccactgcactccagcctgggtgacagagggagactccatctcaaaaaaaaaaaaaatacgttaaataacaaatactgcttttatacattctgacatttcacaaaacaatttgattcaatctctgcttctttgatgctagtgttgttgcattcacaagaaacgcttcttgacttatcaattttcaacagcacataatttttacttccatctaaattaagatttggctgttgcataatctgcatgatactgtcaccagtaattttatcctgagccacaaagactcacttgcacggcaatagttttttcattgtttgtattcatcctataggagtattagtgatttgcactaggaagccacgtgctgtactgagtagcatggcttgagtatcgtgtaaggagcaatggactctgatccagtgaagggctggaagcaagaaaatgcatagagttaggtgggtgagagatggcacaaaaccagaggcagggcaggcatggtggctcacacctgtaatcccagcactttgggaggccgagggtggcagatctcttgagatcaggagttcaaaaccagcctggccaacatggtgaaacctggtctccactaaaaatacaaaaaaaaaattagctgggcatggtggcaggtgcctgtaatcccagctacttgggaggctgagacaggagtatcacttgaacccaggaggcagaggttacagtgagccgagatagcgccactgcactccagcttgggtgacagagtgagactccatctcaaacaaacaacaacaacaacaaaaaaaaaaaaaaccaccagaggcagaggaatgcaaaaagagtccgttggtatggtcccagcaagttataactagggattcaactagaccagtcatagtaggaagggattcaagaaacatttgtgaagcaaaatcagcagggcttggtaactaagtggatttgggggattagagaaaaggaaaagagagaaatgatgctgaggttcctggcttgagtgactgagtagatttggttccattcaactcttctgggtataagtaataaaggagacagagaaagctgaactgggagaaaaaagctatcaggtaatgtattctattttagacccattgaatacaagtggctgttggacagataagtaagctatctggcaagagcagggggatttcattctgacatttaggaaagaaagcttggctggagaatcaatttgggagcctgagcccctaaattctaagtagaactgtgagtctgggtgagattccaggagagaatgccaggaaaaagtggactgctgatgaaatgtagggggatagaaaactaatttaatggataggcaaagaaagagaagcccaaagggggactggtaagatgtcaccagaaaggaaggatgagaatgattaagcactgcaaatatactgagaatttcagcaaaatcatgagtcatgattttccactggatttgatgtttagtgggtcgctgatcacaagggggtggaaagtgaagaaatgcaaatagctctcacgtacctgtattttccaaagctttgttgaaaacataagaaaacaaaatggatatcaggttggggggtggggggtggcagggcggagggaagacttttccagataaaagacatatgaggctgggctcacacctgtaatcccagcactttgggaggccaaggtgagtggatcacccgaggtcaggagttcaagaccagcctgatcaacatggtgaaaccccatctctactaaaaatacaaaattagctgggcgtggtggcacatgcctgtaatcccagctcctcaggaggctgaggcacgagaatcgcttgaacccgggaggtgatttggactcttgctctcctgcctggacgcccctgccaaccttctctaccctctcaaaaaaacagagaaaataaagacttggaaggacctgaagaaaattcctcagatcatcctgttccccagctgcctttccaatctcccaccctcatagcctcccacttgctgctccccagtctggaaggttctatcctcactctctcccctcagttcatgattcaggtccctgctcaatgccttttttgaacatcctatcaaaaatactccctggtcactctctctccggccattacctcgcttttacttccctctttggttttaaacctacttggcattattacacatatagatatagatatatattaacacacacagatacatacatataagtgcatatataatataaagccaatagaaatgattttattactatttattactattttatatttaaataaaattatttaaaacataattttaaaattattttaaaaatgtaaaataatttttattattttaaaatttaaaaaactctcctccactaactcatgagcctggggcattactgttctgtgctatgcacttctgcagcctcagggcctagcacagtgtccagcacacagtaggtgctcaataaagatgtgctgaatgaatactatgaagagccaaggtagagataagactattttttttccccaaggattgcacaggatgaaatgaacttccctagcaatataagggaaaacattaataatttcttgtctaattataaaaagttattagaggctgggcgcagtggctcacacctgtaatctgggaggccgaggtgggcagatcacctaaagtcaggagtttaagaccagccaggccaacatggtgaaaccctgtctctactaaaagtaaaaaaaaattagtcaggtgtgatggcgcatacctgtaatcccagctattcaagaggctgaggtaggagaattgcttgaactcaggaggtggaggatacagtgagctgagatcacaccactgcactccagcctgggcaacaaagtgagactccatctcaaaaaaaaaaaaaaaaaatcttattagagcccagaatagatgtcaaagagaaacacagaatctcctcttgagagtcttagaaaaaaaagataattatctttctggggtagaaaaagaataaagataaatagattaaataatactgtatggttcgtttcaaattcaagagtctatttccccactgatttggggttattttttgcctgtcttttccaaatgagcaggagacaaaattgaatctcttggttccagggctaaaagatgctatcaatttctgttgattctaggtgagataacacaacgcagaaacaattggtccacaatccaaccagtaaactggataatagacaatttctgaagttttttagaaagagtgcagtgagaaactgttcagatttgacagccatttcccgcataactccttcctccaactgacttgttggatccaaaagacaaactggagggagtgagggaagggaacgaatgtagctagtcactcattgccagcatccatgtattttccagggtaggttctccaagaggcaattatgttaaatcaatcatcaggaaatgaggtcttcgtaatgatagctatgactttgatttcaaatactgtgccaatcagaatgagggcttttgttcccttgtcaaaaggatcatttatactaagttctaactaaacaatacccactaccaacttccctccaaaaagaaaagaaaagaaaaaggaaaatgaagcccaatactattgaatgaaaacatatggaccaggggccggggcggtgattcacgcctgtaatcccagcactttgggaggctgagtcaggcagattgcgaggtcaagagttcaagaccagcctggccaacatggtgaaaccctgtctctgctaaaaatacaaaaattagccaggcgtggtgacacatgcctataatcccagctacttgggaggctgaggcaggagaattgcttgaaatggggggtggaggttgcagtgacccaggatcgtgccactgcactccagcctgggcgacacagcaagactgtctcagggaaaaaaaatatatatatatagatacggaccacagaagctcaatatagcagtgagttccttagctatctatattgtacaatttgttctttaagtctcattcctgctaaatcacctgagaatcctcattggaaaaccaatgctcttcccgagtctgcaggccaaatttagggttaaaaaaatggggggttagggagggccttaatttgctatcaaaacccaaaacacacaacatgagaaaaatcaaggttagaataagttcaaaagaagatctggttcttgaccatgataatgtcactattctaatagggtcctaggaagaagagggctaaagacaccaaggaggctggataagtcccattgttggagagaaagttagtgagttctcctaggtgactaaggcacttaccaccccaataaaaatattgttttccttttagatatttcctcgatgtctgctatataccaggccctgtttgtactaagtgctagggatatacagacaggtgctgtatagtgtctgaacctttagaaccaagcagtgagtgtgatcagtatgtaaactgataaagttcaatgcaaaataaccaatgctcatgataaatagaaaattacagagggggttgggcatggtggctcacatctgtaatcccagcactttgggaggctgaagtggaaggatcacttgggcccaggagttcaagaccagcctgaccaacatggtgaaaccccatctctactaaaaacacaaaaattagctgtgcgtggtggcgcatgcctgtaatcccagctactctggaggctgaggcatgagaatcacttgagcccaggaagcggaggttgcagcacaccagtatggtatcactgcactccagcctggcaacagagtgagactctgtctcaaaaaaaaaaaaaaaaaaaaaaaaaaaggccagggacggtgactcatgcctgtaatcgcagcactttgggaggctgaggtgggcagatcacgaggtcaggagaccatcctggctaacatggtgaaacctcatccctactaaaaaaaaaaaaaaaaaaaaattagccgggtgtggtggcacgcacctgtatttccagctacttgggaggctgaggcaggagaatcaattgaacacaagaggtagaggttgcagtgagctgagatcatgccactgttctccagcctgagcaacagagcaagaccctgtctcaaaaaaaaaaaaaaaaaattctagagggaacctagaaggagccagtacctcaacctgaatgagtcagaaacgtttcagagaggggaataattaatctaagtattgaataagacctgggaggttgctaggcaatgggagaaacatctccagtggagtggtcaatttcagtgtgggcctagagagatggtgctgtagaagatgcacccagggatggtgggctgaaggtggactgggagaccgtctttctatgtgatcctataagcagcaggaactgaccagggtggtgctgtgaaggtagggcagtgttcatcctcctctccactgtttccccagaaactaacgcagaaactgatttgcttcattgattaacttaaaacagaagaatgtttctttggttacttcaaggtagctattgctagttgcattggtgggtgctagtcgcattggtgggtgctagtcgcattggtagggatgaggtgggatgtgacagaacaggcagcgggcagggaaggctgggaggcagcagggttggtgcgatgggagaaggcagcttggaaaatcattcctgagatgttagtgcacaggaagaagaaaacagccctatcctgctttgagaaccaaataaatggctgggtgcgcgggctcacacctgtaatcccagcaatttgggaggccaaggtgggaggatcacctgaggtcaagagttcgagaccatcctggccaacatggtgaaacctcatctctactaaaaacacaaaaatcagctgggcatgctggtgcatgcctgtaatcccagctacatgggaggctgaggcgggagaattgcttgaacccaggaagcggaggttgcagtgagctgagatagtgccattgcattccagcctgggcaacaagagcaaaaactctgtctcaaaaaaaaaaaaaaatcccactaaatggaatgaagaccctctaaacatgctgtttatatcaagaagagcctctgccacccttaccctaaagggaagcaaacatctgagctgccagttctccaccatccatagtgagttctctatttttctctttttcaattttctattttctattctttgagttcaaggaaagaaaattccattactttcagcaaaactctagttgagaatgttcaataaactccttctctgtgaagaatagttggaaaggggtattttatttaaccaaatactgtagttaaatgaaaattgctaatatagatcatacacaaatggccaattttgaaagaattagcgcttaataaagtgcacataatcccaaggccctattaaagattatttttaatctttttttttggtgtgcatatgtatgattcagtatcttaaactcaatagtcttcagggaatttaagttattttatattactatgaaaacggcattctggttatatgatttttgtaatagataggatttttacaacaaattttcaaaaatgtataacgtaatctaaaaccaaaaagagaacatttggggattgttcacattaatcctttttttttttttttttttttttttttgagacagagtctcgctctgtcacccaggctggagttcagtggtgcaatcttggctcactgcaacctccacctcccaggttcaagtgattctcgtgcctcaacctcctgagtaactgggattacagatgcctgccaccacacccggctaatttttctatttttagtagagacagggtttcaccatgttggcaaggctggtcttgaactcttgacctcaagtgatctgcccgcctcagcctccgaaagtgctgggattacaggcatgagtcactgcacccggcctacattaatcctttattcactcagtaaacatttgttagtgctgtaccccaacagcgtaccgaaagatgaagaaagaccaaggctgttcttcctcaaagagttcacagagggggatgcacatctatttttaataatatttataacacatttgttcattgtaatgacagaagtaggaagagaaacacagatgagaaaatgctcaattttgcctgtaccagggagtgagggaaagggacatgggaaatgacgcttaagaaaagtcctcacagccaggtgcggtggctcacacctgtaatcccagcatttggggaggccgagtcaggcggatcacctgaggtctcaggagttcaagaccagcctgaccaacatggagaaaccccatctctactaaaaatacaaaaattagctgggcgtggtggcgggcacctataatcccagctactcgggaggctgaggcaggagaatcacatgaatccaggaggtggaggttgcagtgagccaagatcatgccactgcactccaggctgggcgacagagtaagactctgtctcaaaaaaaaaaaaaaaaaaacaaacagaaaaacagaaaagtcctcaagggtgagtgagagcactccaacaacagaaatttggaaaggaccaggaagcatggaaaccaatttgggagctcctgtagtaattcatggcagagatgatgaaggcctgaactgagaggaccccagtggggacagacagtgacctgctggacatcggaggtgggaaaaggaagccatctgcactgtgctgtctaatatgagaaccacaagccacatgcagtcatctaatataacctcattaaaacatgttaaaattgaaatgaactcagcttgcactagccacacttcggggcttgatagacatgtgaagctagtggcatctgtactggatggtacaaacagaacttttctattattacagaaagttctactgtacagcagagccaagtgtttggggcttgagataagtagttgaacgttggtacccctaattcagaagaaatgccagagaggcaacgggtttaggaggagccgatgggttgagtttgggatgagctgagtttgaagaaagtctaatatcatggtgatgtcaggatccttgtgagttcagcatctcataagcgacagcatagtgagggtcctggtttttagcctcttccttttctgaaacaaaatccaagcttcaaaagctaacctgcatgcctgtgcctattagagggaaaacaaaaacaaaaacaaaaacaggcggcaagggaattcggtgtggagttctaaaagaagtgtgggcggctgacccagagttgggagtcagtggtatactgagggtagttaaagtatctcacagagaaaagattacccaagagaagaggggtggaaggtgagacctggaggaaggggtaaaagcaacaggtacaggacggctgggggaacaggatccacagaaacgtaggagagtctggaaaaaccccagtcaggaaggagatggggagaaacaggaacaaagtgtcaccagtaaagcccaggatgaagagaagggggaagagccaagtgaactgaatgcagcaggaaatctaataaggcaccaaaaagtgtctggtgcatctggcaatttgggggccacctcagtaagaccagttccagtggacagatggtggaaagatacctgcgcacatagacacgtggaaggaaatgcttgtttttcaactggccgcccccaaagacataaggatacactgggagctcctcaaggggctggagcatccgagttcatgagcaacacagagaattgatcaggacgcttcaggcctcccggcgcatccactcagctataccgctgctactggggaggaaatgtattgttgaccatgttagcactttagaacagcccccagctggtccccagaggagggaaggcatgaatttctgggcttctcccctgaacaggaccagacccaagaatcttagtgaaacaaatggtgaaaaacttctgctgtgacatagaggcagggattctgatttcattgaaaactcttcagcttgtcagagaaaaaaaaagacacacacacccagtcatacacacatgcaagcacatgcatatacacagtgcatacatgggcatgcacacatatatgcatgcacatacatgtatacatgcattgtgcatatacactcacgtagacactcatatagatattcatacattatgcaaaatgtgcacacacgtgcacatacataacaccaccctggttctcttttcttttctgcagcggcagaaccaggtcaagaacccacgtctcctgacttcagaaccctcactctttcccctgcagcagttgctcagggaggcgactgccaagaggaagcagatgctcttgctggagcaggaggagacccttcggggactatgcaagactcagcctgaagtgggtgccaagtgttcagaactgtttaagtaaaagccacttgaccgacccccatcagcccaagtaattcggctgcactctcctaagctttatgcaggaactccgctggctcttaataaacccaaataggaacaaaagaaaacgtgatgactttcagaggtggacattagctgtgctgcgctgaaggatgcctgggctagatcctgcccaggtctccaggctcggtaaaagggcagctccatttccccagcagcaacccccaccccaagcccctgctgtaccccaccttgcccctcccctgccaccactcttgctggggtggaaatacagggtaagaaaaaaggccctaaggagtccacctgccaaacccaactacagactgaagcccactttaaatttcctatcctgaaaccaacaatcgtaattatttacattgtttttttaccctcttaagtcccattttctttgtgtttcatcatcatttgaagtggggagcgaaggaatcttatggaaaggcaagggtcggatagacttgatggcctgtctcatttcccctcattactctaacaccacaattcctctccggccacattcaccacttataaagtgctattctcatcatcaggattatagcaatgggcaaatcaacgaactggggaaaggagacagcagcaaggaaaaactcatgtagcagaatgctgagggagagaacgacagcaggggccgggcacggtggctcatgcctgtaatcccagcactttgggaggccaaggtggacggatcacttgaggtcacgagtttgaggacagcctggccaaaatggcgaaaccccgtctctactaaaaatacaaaagttagccgggcgtgggggcaggtgcctgtaatcccagctacctgggaggctgaggcaggagaattgtgtgagcctgggaggtggaggttgcagtgagccgagatcacaccactatattccagcctgggtgacacaacaagattctgaaaaaagaaagagagagagagagagaaagaaagagagagagagagaaagagagagagagagaaagagagagagagagaaagagagagagaaagagaaagaaagaaagagagagagagaaagagagaaagagaaagagaaaagaaagaaagaaaaagaaagaaagaaaagaaagaaagaaagaaaaagaaagaaagaaaagaaagaaagaaagaaagaaagaaagaaagaaagaaagaaagaaagaaagaaagaaagaaagaaagaaagaaagaaaaagacagcaaggcaaggagatggaaagtggcctttgggagaaggagctcacttcccagagagataccatttgagcaaggatgtcaacaaaggaggaacaagtcgtgggggtatctggagggaaggaagggcaggcatcagggttctgagaaggagggtgccaggattatgaggatgcaggattatgaggatgtatgaggatctgcaaggaggccagtgaggaagagaaagaggaatgaagggggcgggctggggtgacagtaaatgagtccagaggggcagccaggaccctgatcctggaagtctatggttaggtccttggacttggctctgacacaatctgatttgcacttttacagtcactgactgctgggtggagaccttactgcaagagggaaagagtgggggcaaagggatttgtgaggggggcaggcgcgccctccagggcagaggaaatagtggtaagtaactaggaatgattgatgggtgagcacttcaacagcatctgcagttattaatgcaacaacaacaaacaacggcatccatgctgcaggtgtttccgagtcactgtgctgggaaagcagacactaatcatgaaacagcagcaattacagagttcagcatctcacaggcgacagcacagtgagggtccttgtttttagcatcttccttttctgaaacaaaattcgagcttcaaaaggtcacctgcatgcctgtgcctattagagggaaacaaacaaacaaacaacaaaaaaaaaacacgaaaaaaaaacacgatgctgccctccagaaggattatgttgcaggaggttgcaacgctgaggaaacccatcagaatatcagcaatgctgttaaactgaaaaatcgtgtccaagtgaagtcagagagaaatatttctcctggtagatttatgaaaacgaatgccaaaaggcaatgaggtggcctcggcagctggaattccactgcaggggcctggactgcgggagctggagcgcatgggaagtgatggacgtctctactccaggaaaagggctttgctcattgacccacaggcccctgctgaggcgaaggcccactgcatcctggagatagtcagtgtgtggctcagtgttaaatcctaagacaattagaggcgtgggttgtgggtggaaggcagggactggcaacagagccctgccctcttgagctctgagcaaacatataaaatcaggtgtgtcctgtctccgtacataagaagtagagatttgggtacggtacagatgaaaacacccacctggatgggccgggaaggcagaccacaggagagaggctcgggtttggactataactggatatttgtgtgaagattcaccactgtcttccccagcagactacaagttctaggagggcagggccatgtccgccagtgcacactagaattaaatatattcccagcagacagcagaatgcctaacacccattaagcttttgcataaacaccagtggcagtgagttgaatggggtcccctctaagattctgaattctgctcttcaacactgctaagactcttaacagggttgattatgggaacagatgctggtggctcacccaacctatgttggcactgtgctgcatgcatggggccctgagataaagacacagctagggcctccctggggaacaggaaacagggtctttgcagaggtcataaagataaggccatcttggattggggtgggcctcaaagccagtgatggtatccttataagaagaggagaggccgggcacagtggctcacacctgtaatcccagcactttgaaaggccgaggcgggtggattacctgaggtcgagagttcgagaccagcctggccaacatggtaaaaccccgtctctactaaaaatacaaaattagccaggcgtggtggcacacgcctgtaatcccagctactccggaggctgaggcaggataatcgcttaaacctgggaggtggaggttgtggtgatccgagatcatgccattgcactccagcctgggtaataagagcgaagctctgtctccaaaaaaaataaaaaggaaaaaaaaaaaaggaagaggagaggacacacagaggccaggcgacatcaaaagcagagactggagtgatgcggctacaagccaaggaatgctaaaaatagctggggctaccagacactaggaagaggcaagtaaggattctctccttgagccttcagagggagcatgggtggccctactgacgccatgatttcagaccgatggtctccctgagaaaataaatctctacggttttaagtcttccaagtttgtagtaatttgttaacagcaaactactccataggaaatgaatgcagttgctaagcgaagaataaatgaataaacaaatcaacaaagagatggctggtccataccagcatgccaagagcaaatatctatagatagaataaccggacatactttgaaaaccagcaagggaaacaataggcttaacatgcagctggtggaggtaaaccaggtgtacaattagcttaacaaccagtgggtacccctctggtttcttccagtgggtacccctctgcccaggaggaacactcagtcccaaggcctttttccagcaccattacagaactattatagagtggatcttgccttgcaaataagggaaactcagaattattttgttttttgttcttcttagtcaaagatgataaattgtagttagaaaaaaaagtcattaagaaattccattgaaataggccgggctcggcggctcatgcctgtaatcccaacactttgggaggccaaggtaagtggatcacctgaggtcaggagttgagaccagcctgaccaaatgatgaaaccccgtctctaccaaaaatacaaaaaattagcagggcgtggtggcaggagcctgtaatcccagctacttgaggaactgaagcaggagaactatttgaacctgggaggcagaggatgcagtgatccaagatcagggcactgcactccagcctgggcaacagagcaagactctgtctcgaaaagaaaaaaaaaaaaaaaaaagaaattccatcaaaataaacaagaaagggccaaaggaaaaacaagttcttcttcttggatggatcttcaacaacaaaagcccattgcagcccctgatgctgggtctctctgaggcacaactccatctataatactcgctagttcctaagaccccgattcagacataagaaaaataatcaaagttgctcacgctctgtagtgacctcttgcaataggtccagccactgtgactctctcaaaggtttatttgcagcactgtgaccgtagaggccccagccagagcacagaggggcagccaagcccccgggtaatgagcagacacaaagtctcacagcccatgagcaccaggtcatttatcttcctagttttgttcattaaatttgaagggggaggtggagagagaagataatggaggaaatcaatgtgaatttttcaaagtaatcgggcttgattggtctttttatttgtctaggaaggtctgtctgcctagaggactgggagacaaaatatcctgaggtctcaataaccagcctcctcccagaaccggaaaactcaactgcccttgccctaaaaccatgccccacctccctctcaccctgctatatgcataacaggagcaagtgagctcctgggcaggaaaaaaagtctgcaccctcctgctaaaactcttaatagtgctgaagacgggaacagatgctggtcactcactccacatgggccaggcactgtgctgtatacatgggaaccctgagatgaaaacacagctagggcctccttcctcagtagtcattactgctagggagggcagatgacacagaaactgcagtgacagaggacactccctcaaaagcggtgagcccaagccgggcgcggtggcacacacgtgcagtcccagctacttgggaggctgaggaaggaggaacatgtgagttcgagagcccaggagttcgagagcagcctggacaacacagtgagactctatctctaaaaaaacaaaaagaggtgagcccagagttggaagcctggggacgattttccagtaataaaggggaagggcatttcaggcaaaggaacccaacacgttcagtctccactgaattttcaccatacagtgtccaaaataaggaagagcggccacagacactctttggtggtgacaaagcaaatcctatcagcttcactctggtctgcatggcaagagtctgtcacctagacacagccactctgagcaggtgcagggccactctgaggaatgtggtgaagggagggctcgcctcgcagcaacaaggaaggtcccagagcaccccaggcctttgccactgaaggaatcctgagttggcctgaggaaccctctgggctctaactgggccccggtttgtttctttccttctcaggtggcactgacgggccaagggattcaggatctcagagcgagaattacttcataggcatgaaaagccttgtgatataagtgattctctcacaaatgtggtccccgaaggtgggcaggagggcatggctgcattacagaacctttccccctcctggaaaagctcaccagtcccatcagcagggatttctttactcaagaaaagatagcacggctgggcacagtggctcacgcctgtaatcccagcactttgggaggccgaggcaggcggatcacgaggtcaggagatcgagaccatcctggcgaacatggtgaaaccccgtctctactaaatatacaaaacattagccaggcgaggtggcgggcacctgtagtcccagctacttgggaggctgaggcagaagaatggcatgaacccgggaagcggagcttgcagtgagctgagatcgcaccactgcactccagcctgggcaacacagcgagactccatctcaaaaaaaaaaaaaaaaaaaaaaaaaagatagcacaggccatgattctcctggagaatgaccagtatgaaaatagcagtgctttgtggctggatggattctgtttctgtttcctatttttttttttttttaaatagtgtctaggccaggcacagtggctcacacctgtactcccagcaatttgggaggccaaggcaggcggatcacctgaagtcaggagttccagacccgcctggccaacatggtaaaaccccatctctactaaatacacaaaaaattacccaggtgtggtggcacatgcctgtaatcacagctatttgggaggctgaggcagaagaactgcttgaacctgggggacggaggttgcagtaagccaagatctcaccactgcactccagcctgggtgacagagcaagactctgtctctaaaaaaaaaaagaagacaaggtctctcttggtcacccaggctggagtgcagtggcgcaatctcagctcacggcagccttaacctcgtgggctctacccaacatctactgtcaaccctgacccctgcaactgccactcctggcatgaagaagaactcaactctttttttttttttgagacagagtctcgctctgtcgcccaggctagagtacagtggcgtgatctcagctcactgcaagctccgcctcccgggttcacgccattctcctgcctcagcctcctgagtagctgggactacaggcgcccgccaccacgcccggctaatgttttgtatatttagtagagatggggtttcactgtgttagccaggatggtctcagtctcctgacctcctgatccgcctgccttggcctcccaaagtgctgggattacaggcgtgagccaccacactcggccaaagaggaccccaactcttgacgctcttttgggttcacaacgagctagagtagagcaaaagggccagaatgaggagtctggttagacaacacctcaaaagttcctacaagtcacatgggagagagggcagatccaaggagctccacaatggcaaaggaaagcagatgagaaactggctgcggccaggtgaccagaccccattcaggagtccacgggagaagaggaggaagtcagccagaggtctgagccacaaatggccaggaagccaggccaaggagtctaaaatagtcaggattgagagacgtgggcaccacgggtgagaaggacacctgtgcctttgcaggcagtgtttcctcctgggcttccttcctacccaaaaccagaacggggcttggctgggtctgtgcacacagttggaaacagtggacaagtgctggcacagagagctggggaggtggatgcaggcaactcctgacccagcacctggaatgatgcctaggccaagggtatttcagctggcctgccttgctgtgagagatatacactgaatcctcctgactccaactgatgacagaaggcaactcacctgaaacagaccttgtttaatgaaacagggctttaatggacaaatcagcataacatccactggcagaatttccttaaacaaatccgattaaaggcccaaaatcaaaatacacttaggtttcaaatgatgctttccctggacagcaaacttcatagatcactatgatgtgtcttatcttccacctgcttacactcacctggaaacctgccttgttaaagtgtacgagaacatggagaccacccttcaagtcacaaatcctgccagcagtgctcctgggccagctcttgcaccggagatcagggctgcctaatcaaagcatctgctccttcctggaaggctccaacagccaattccactaaagcataaggcactgaccatcccagaagaaggaaaatgggctgattaaagtcccacaatcaccagaggagataagtgggaagagagagctggcatttaggaagcagtgagatatttcctgtgttttcacacagcgagtccctcctgctcatatctcttcctgtcctgctggagagcacaaggaaaacaccatcagaaatgaatgagtcacgcgctgggtgcgggggctcagaactgtaatacctgcacttcgggaggccgaggcgggcgcatcatttgagctcaggagttcgagaccagcctggccaacatgatgaaaccctgtctctactaaaaatacaaaaattagccaggcacagtggcacgtgcctataatcccagctactcgggaggctgaggcacaagaatcacttgaacccaggaggcggagattgcagtgagccgatatcacaccatggcactccagtccacgtgacagagtgacggagcgagactccaactcaaacaaacaaacaaaaataaatgagtgaatcaggaagatggtatgagacctcctgcccatgtggagcgggcagaacttaagtgggaacctgaaagatcttcctgcctcacagaagttctgaaatagtcatcctttctcgctttcctccccagaaacaacaaacagagtcaactgctccttactccagcccacctccatcccactccactcaggtgatccagttccattccccttaaatgggtccatgcagaacctcctactgcagataaagccaacaaccacatgacacatgaaacccacagaactctgcagggaaacagtctgcacccatatcccacgccacagactgcggtgcacagcatggggcagtcaccaaagcggggcgtaggggagaagtggaaggaggagacaggtcgttcctggacgtgggaaggggtagagtgtgttgaggtgagcaggggcagggcacagaggagaggacagatacatcacttatttacagcttggctcttgtcttctcatgggagcactccaagccttctatgatgtaggccttagttcctccttctccctgaatgtccctttattctgcatgtgccacaagtgagacatcaggctatgttctggcatccagggcccgtcccttcagtggccgtcctcactgaaacccaaggcttctttagccagcgtccaggccaggtgctctctgcctcctgggatgttaaccagccagcctaataaatccacaggtgtgaatgggttgaggctgggggcctccactttttctcagataaagaatattttatcagtattcttttggtggcagggagcaatcctgggagagagattttgggggtaggtaaagtcttacagcctccttcaaatcgctgctgcaacctgctagccacacacacagggccaggctggccacttcggggccaaaacaacacggctgcatctgaccaagacactatgtgacttgcgacaggacactaccgtgccgtctctgccaagggcaggagaactgtccagagagccccggcttgccaggctggttctccatgaaaacaggtcacacaggccatcgaggcggatgggtttctttaggaggattctgaggaagcgtctacagcccatggggtgaccaccagtcagtaagggaggagacgggcatgctgtaggggtgatgctaggtgcatgccaaataccagagggcaaaggaccccagcatggtgtcattatatgggtgaggccttcaccccaaactgccagggtggcaaatcccaattggatgggtagaaattacctttaactgccccacgctgacgcatgactgtatctccccagtcaaacaaggatgctggccagagaaggttccagatcttatactatgaccagggatgtttccactccctctccaaggcacgggagccaagcctggtcatctcacaggatataaagattaaccaacaacatccacattcaaacggaaccccaaagctaaacagaggtatctcaaaaccatacctttcagacaacagaaataatctcagagaaccgtttcctaagagcaggttgcctcagagtgcattctggaaaaatctttttgttttgttgttttttgggagtcagagtcttgttctgtcaccgaggctggagtaaagtggggcagttatggctcactgtggcctcaacctcctgggctcaagcgatcctcccaccttggcctcccaaagtgttgagattacaggcgtcagccattgcatcccacccattctggaaaattctaactggtccagtaggtatgaagaatgcgattctggggagagtcacgttgcctgttagcaaattaaccttagaggggtcttgcacttcagaaacacattgacttgaatcccattttccaagctcacttgaccactcattattagcacccatcagacgggtctccatgcaacacgctctggagaaagcaaactggaaaattacgaagaaagaactggtccaggggttcttaagctgggcttcagacattcaggaactgtccaaaatcctaaggaaaaaaaagaactgtctatttgtgtctttttgttagggaagaggatcctcagcttccacaggttcccaacagggctgtatctgccaaggtgaagaattgttgatttatgccaaagtcctcactcaccaatcaggaaacagaggcttgcagagccagtttgctcaactgtctttctttcttttttttcttttttctttttttttttttgagacggagtctcgctctgttgcccaggctggagtgcagtggcgtgatctcggctcactgcaacctccgcttcccgcgttcacgccattctcctgcttcagcctcccgagtagctgggactccaggcgcccgccattacgcccggctactttttttttttgtatttttttagtagagacggggtttcaccgtgttagccaggatggtctcgatctcctcacctcatgatccacccacctcggcctcccaaagtgttgggattacaggtgtgagccaccgcacccggcctcctcaactttctatagcagttacagcagaaggttggactggaacccagatctcctcaattctatcacaacatttttagtcgtaagttgtttgccaaggctgatattacgaagaggggaggtgggaagggctgaaaaactacctgttgggtactacgctccctatctgggtggtggggtcattcatacccctcagtgagtatcacatgatatactcatataacaaacatgcatatgtatctcctgaatctaaaataaaagttgaaattatttttttaaaaaagtaaaagaaaccgggtgcggtggcccgtgcctgtaatcccagcactttgggaggctgaggcaggcagatctcttgaggtcagaagtttgagaccagcgtggccaacgttgtgaaaccccatctctactaaaaatacaaaaattagccaggcgtggtggcatgcgcctataatcccagctactcaggaggctgaggtgcgagaatcgcttgaacctgggagatggaagttgcagtgagcagagatcgtgtcactgcaccccatcctgggcaacagagcaagactccgtctcaaaaaaaaaaaaaaaaaaaaaggctgggcacagtgactcatggctgtaatcccaatactttgggaggccaaggcaggcagatcacttcaggccaggagttcaagaccatcctggccaacatggtgaaacctcatctctactaaaaatataaaaaatagccgggcgtgatggcaggcacctttaatcccagctactcaggaggctgaggcaggagagtcacgtgaacccagaaggcagaggttgcagtgagccaagatcacaccactgtactccagcctgggcaacagagcaagactccacctcaaaaaaaaaaaaaaaaaaaaaagagtgttctttgcatcagaataataccaaccatagcaccacactttgcccagaacctccgtgggacttctactcacaactcagtataggttcttttttcttgcttaatacatattaaaacccacttataaaacaagtaacagagtaatcacacctttataaatagaccttccctgtacacataaaataaaataatatcgctgcctccaccatacggatttagagatgaaccagttttttaaaacactcataggtgggaattgaacaatgagaacacttggacacaggaaggggaacatcacacaccggggcctgttgtggggtggaggaaggggggaaggatagcattaggagatatacctaatgttaaatgacgagttaatgggtgcagcacaccaacacggcacatgtatacatatataacaaacctgcacgttgtgcacatgtaccctaaaacttaaagtataatttaaaaaaaaaaaactttacacaaaaacgttctctttttacacatctcgtggtctccctcacatctgcatctctgtagtttgctgggtcctgtctggagtgcccttaccctcccgacctcccttttcctgtcagcctcctcgttctccttccgctcgcccaggcaatcttctgtccttcctaggagaggcagtctgattctgattcttctgtgaagaccaccctgagcacatcaaacaaaaccaaaccccacctcaaccattctgagcccaggctggagtacaatggtgtgatctcagctcactgcaacctctgcctcccgggttcaagcaattctaccacctcagcctcccgagtagctggaattacaggcacacatcaccatgtccggttaatttttgtatttttagtagagatggggtttcaccatgttggccaggctggtcttgaacttccaacctcaggtgatctgcccgccttggcctcccgaagtgctgggattacaggcgtgagccactgcagcctggcccagtttggaaatttctaacaagcagttgaaaatgcagggctggtgctcaagaaggcgttctgagcaacgtgatgggatttgggatgcacaggcacactcctggtgggcattggtgctgcaggcatgaaagatgttacccaaggagcgtgccaacaccaaggaaaaggaggaggtttgaagagagccagacctgggtttaacctctggtttttctagctaataaatgagcagctaagtaagcctctctgagccccaatctcctcatctctagccagtccaatcctatgatatggaccctgcagaagcctggagagctggaacttcacgatgtctacagaggacctagtgcagtccccaccaagcaggaggcattacaacagaagccacacacagaagacctcaaggcaacaggggaatctggagaaggtggtgccccaagtcagaagagaaagtggctgttaacattatttacattcttaggacaatatcttttttttttttttttaagtgatgggggtcttgagccgctacccaggctggagtgcagtggcatgatcacagctttctgcagccttgaattcctgggctcaagtgattttcccacctcagcctcccaaagagctgggagcctgccaccacaccaagctcaaggtcattaaaggtgcaagacaggatccttaatggtggcaacttcagtaggctgacggaggagaacctgagggtacgggggtgaggaggaaacaccggaccagaagcatcgaccagagcagagcatctcacttggtcctgcctgtgccaaggacaagctgacatggagaaggcagaagatggaatcaaaatgtcagcaattggcatgatcttacaccccagccctacttgctcatctccttgcccagaccctgagctgcgcccccttctttgaccttctccccatccctcttgctccattggcaatcggctcaagagtgctgactcgagagacagctgaaccccaagagctttccccagatgtggtgtcaggacggtagcaaaatatataccatttctgcttttttaaatatgcttgggtattaaagtaggaataaaacaatcctgatgtttccagcaatttctaaaaagtcctgatttatactctgaatgccaaatgtccagaatataatatgccatattatatactggtgtagactagagaaagttagataggaggtaagagggcaggaggaaagaaattggagggtgtaggggcaaaaaaaaaaatccttttttaatttttttaaatgggaagccttgggcatctttataagctgaatgaaagaagtcgacacagcggacactgtcataagtggaacaaaggatgaagctaatcatggaggcaagctccctggagagacagggacaaaatcaagaatgagctggagaaattaatcctggagaaagggagggacctgacttccttgaaggcaggcagccaggaagtaaagaggaaggaaaaatcaagatacatttttggcaagggggcaggaagtggatggagtctcctcctgggatacccagtttgctcagtgaaataagagatgacatcatctgttgagaaggaaaggcctaaaggataaggatgaagtagggggtagggggagagaggtagagatttggactaatcaccgtgggaaacaaatgagagcacagcaagtgtatgttagaggtctgaggactcgcccaaggctcctctgaggttgcggaccatgaacttgacatgaagaccctctgtggcatggtggggttatctgctagttctccagaaatcaagatacttcttttatcagagaaccagggtatctgatagactctgtatctcagtctgcatgcaacagaataatcttctgttctatattcttcaaacatctccagttcccattgacaacggtaatttttaaatgtcaaaaattctgaatatcagcatcagaaagttaaaatatgcagttgccaaagaaaaagaaatccacatacagttggccctctgagtcggaacccacagattcaacctaccatgaatttaaaataattgaaagaaaaaaaaaggctgggtgtggtgatgcgtggtgactcacgcctgtaatcccagcactttgggaggccgaggtgggtggatcacctgagatcaggagatcaagaccatcctggctaacatggtgaaaccctgtctctaccaaaaatacaaaaagttagccaggcacggtggcgggcacctgtagtcccagctactcgggaggctgaggcagaagaatggcatgaacccgggaggcagagcttgcagtgagacgagatcgtgccactatactccagcctggacgacagagcgagactccatctcgggggaaaaaaaaaagaaaaaagaatacaaaataacaatacaataataaaaataatacaaataagaaacaatataactacttatatagcagtgatatagtattaggtatgataagtaacctagagatgactgaaagaatatgggaggatgtgcatataggttatatgtaaatatgatgccattttccatcaaggactggtgcatctgcagatttcggtatccacagggtcctggaactaataccccataggtactgagggacagttgtataaaacgttgaataggccgggtgcagtggctcacgtctgcattcccagcactttgggaggtcgaggtgggcagatcacctgaggtcaggggttcaagaccagcctggccaacatggctactaaaaatacaaaaattagccagatgtggtgacagactcctataatcccagttacttggaaggctgaggcaggagaatcacttgaactcgggaggcggaggttgcagtgagctgagatggcaccactgcactccagcctgggcgacagagccagactctgtctcataaataaataaataaataaaattgaatatctgtgccttttgtttgcggtggtttttggttttgattttggtttttgccaatcaagtcattcccctgtttctgctttagtggcacaggctggggccactttgtttttcattgggaaaaaatggattttctttttattcatggatgttcgctgtcctgaccggagcctcccgggtatctcagttgtacccaaccttgagaacctgttgtcatacccaccccacgtattaatcatgttacagacccagggggagactgcctgtcccagggctaggtaactcctcaagagaggaaacagcttattctgaagatgcctctcctgtgctagccaaccacctccttatcaaatgctcacaccgggacactatttctctcgcccaccatccacccaggcccaggtaccagtcaactagggacacccctgtagcccaccagaattgttcaaactagctcgttttaatgctttacctaattgttaccctgccctgcctcgcttttcctgagaaaatcccaacaaaggctctagtcccggctttcccctcactcttctgcttcctggtgctttcctgtggcctgtgtggtacaacgtgggcctggcatgacatggcagtgtgcccccttctcttgggaaatgcaactcatacatcctcacctccataaattaaaatcatgtggatacaagtgagacatcccactcccaatcccaaccgtgctggcctttctccagcctttcccctgctacctgtcatcgggtgtttagctcatatgctagcaccttgggaatcctggcagtgggcgaaagccgagccagtctgacaataaccacaaaccaggggcccagatggtcccacgcctcgtcagcctggagcagctcacatccagtagctcctatattcacacctttgtgactgctatgaagtgaaatgtccccgaatccattttttcaaaagtctgctaagtagacatttttagggaaccttcgctttcttttcatgtaaatagaaaccagccacctacacccacacaaccatatgccaaagtctggtgccatctactgaaacacacatccacacgtctggccgtacccagtaatactcgagtacacaaaggagatctggccttttgttttacaagaagggattgtgtgtggagctgctccatcttttggaacaaagagaacttctgctcaattaatgagcaaatgctggagttcactgcatttgagcactccattaatctcagcactgcattcacctccaagacacgacattgtgagctgccctcacagcagtgaaatgcgcgcacacacaggcacgttacacatgcacacacatatatctgtacacacaaacacacaaacttgaaaccttctgtcaagagggaaaaaagagaccttaaaccactatttgatcaccttaagcataaatgaaaccatacagccctaactcttgccacactggctcgggcaggctcttacacggttcctccaatgagcacagctgggagtcctcagggccagtcccaggagttcatcaaagtccattgcacgcggtcccttccatgtctattatggtcctcttctgaatgggaggcagccacacccagctgttaccatggcagcagctgggcactgctgccacttttccaggatgtcactgtaggaccaccaggcctacatcctccttctgtttcacaaaccctctcttcccctgccccccaaccatcctggccttagtacttgggcaggaacccaacagtcaaaactgcaccagtggccaagttcgagagatacatcccagccttcctctggccactgaagccacattcctgggtccatatataccctattcctctttaccaggcaaggactctcccaaaaggcttccccatctccctccgcacctcaattcatggcaagcccacccaactcattgaccaaacatgcccagacagggctgaatccctctagcagactcaagctcaagctaggaatacccacacgttccacacacatagggagactttaattaagactgtgatgcaattcatacacttctgaaaacatttgcaaattaaaaggaagttggagagggtaacagaaaggaatggaccagtacaaacgtcatgatttactgggggatgaccactctatcttcagtgaccagataggaagtggtccaccgcttggtaaaaggacacccagcgggggaagaataggtccacattccattgagataccaatgccagttcataacaaacacagctgtttcccatcacctgccaactcaagatgcacacacgtggttaacacacactctcttctccacttctctcttctccacttccggggttgggccctgaaatcattctgctttcccagcatttgctaagcatctgtcaggcgccaagcactgtgtctgggctgtggattcaaaggcaaggaaggctggatccctgctctctgggatttatctcgcggcaaaatgctcctacctaaatggagttgggaggaaactgcgagttggggaaaatcactagagggaagaagtgaggggggatttgggaacacctggagcatgtgagggacaaagagcatgaccacttctcaacagagcagctaacaggggagatatacacagccagcaagcagcatgcaagacactgaaatgtctagaaatggaaaaagatggacaagaggagggaggagacattccaagaaaaaaatttcatttgcctgacaatttaactagggcccttgtgacatgtggacgtcatggaaatccactggctgctctttattgggctgtgtacaaaataaaagtgggcaggaaccactgtgatgtaaatatctaacatgctaagtgtccaactgagttattatcagtaggtcaggattaatgagtgaaggagctgcgttgttttctccagaagacattcttgagctgattcatctgaacagactccatctcctctgtgaccaccagctacctacagcaggaaggtctctgatgaggtgaggggttaggtgctataggtggccaaggaacagaatgaaactaatgggatccaaagacctcacctcatcggcactgttacctgccaggggcagaacaaaaagaccagggtgcaacctaacgagctgaacttacgagattcgtgggccatctggtgcttattatctctcctctacaggactcattgtccttacctgtaatgtaagagcactgagctggctaggcgtggtggctcacgcctgtaatcccagcactttgggaggccgaggcgggtggatctcctgaggtcaggagtccgagaccagccaggccaacatgatgaaaccttgtctctaccaaaaatataaaaattagccaggagtggtggcacatgcctgtaatcccaactactcaggagtctgaggcaggagaatcgcttgaacccgggaggtggaggttgcagtgagccaagatcgcaccattgcactccagcctgggcgacaagcgtgaaactccatctccaaaaaagaaaaaagaaaagagcactgaactggatgatgatttccaaggtccacttaaactcctaatgtccctgattcacaccttgcacccacccagtctcagccagagccctggcgcaagacagtgctctcaggaaatgttgggaggaaagtgagtctattacaaccagcatcagaagaagggtaaaaggaaggaaagaatgtccctctcaactggccccagctttcccaaaactctgcctttggcttgtgctgcacagatgacaaataactgttataaaacacatttataatccagcaacagtcagcctgcggagcacctcaaacccaaagaaagaagggcccccggccagccttataaatcatgctcgaggctgggcacagtggctcaagcttgtaatcccagcactttgggggttgaggtgggtagatcacttgaggtcaggagtttgagatcagcctggccaacatggtgaaaccccatctctactaaaaatacaaaaattagctgggcgtggtggtatgtacccataatcccaactactcaggaggctgaggcaggagaactgcttgaacaggggaggctgaggttgcagtgagccaagattgcaccactgcactccagcctgggtgacccagtgagactctgtctcaaaaaataaaataaaataaaaataaatcacgctcataacccaattcggacctccaaacctggtttaataaaatttgcctctccacgtgattcattctggagcatggttatacatttgttaatgtgccacagcatgatcttgaaaagttggggcatagaagagtgtgccgaaagacagtctctgcccactcttgctgataataataataataataaagctatagaataggaaatgggtaagccatttggaaaaacaaaaaaacagaaataaccaagcaaaccactttaccatgatcataaaggtgaagaaagagacagggaagagaaagggagagaacttggaccacagcaacaacgatgaatagcgtagaggggcttttgatgatacctagcatgtggggagctgagaaattgatctgcttcccagaagtaaagagaaggtgaggaattgaaaacccaagggaaccgggcgtggtggcgggcgcctgtagtcccagctactcggggggctgaggcaggagaatggcgagaacccgggaggtggagcttgcagtgagccgagatcgtgccaccgcactccagactgggcgacagagggagagtccgtcaaaaaaaaaaaaaaaagaaaaaaagaaggaaacccaagggaagagaagccagaaccctctgcctgtgatgatgaccccgcgtggggtggagacagagctgccagggtggtcgggcagcacggccaccacagctgcatctctgatgctctggttaaccccagtgccctgctaggaccacaggctctggctggaattcactttcggagagccgggtggacaagcacaaacgtggtcacaatgaatttcaaggacttcttcgaatgcctttattactgcggaaattcattgcctgaatgatgtttgagatcaatggactgccagctagagcttgggttgctttctcttttgggagaaactgcagtttcaatagattcggctggtgtggccgttttcaaaagggctcctctttttgtgctttcgctaaacatttaataaatttatgatttctctgtccaccaaacacggccagaaccactttagacataagtggaaattcaacagggggataagggaaaatgtcctccctgctgcaatctatcccaacacaacagccagggtgatcctctttaaactgaagtcaggtcacgttcaaacgggaagcctcagcacaaaagccaggatcttactaggacttctgaaggcttgtgcaagctggctaccattttatttcccccttcctcttctaccattctctgcttgggcaacccctctttctgactcttcttgaacatgccagctctgccccacctccaggcagtgacacctgctgggccttccacctggaatgctcttctccccaaatatctgcctggtttggtccttcacctgcttcaggtccttatagaaatgccaccttctcagatgttccctaaccatgctccctaaatttacaacacttaaaccccatacacacacaccctcttcccaccccctctacaactacaccccatacacacacacacacctcctacccccttacaccatgtacaccctatacacaaacacacttctcacccccttacaacacctacaccccatacacacacttcccaccccctctacaactacaccccatacacacacgcatacttcccaccccctctacaacacctacaccccatacacacatgcacacttcccaccctatctataactacaccccatacaaacatgcacacttcccaccccctctacaacatctacaccccatacacacatgcatacgtcttacccccttatctgctgtttctttctccttagcagtcaacaccatctaacgcactatgtattttgctcatttagaactcattctctgtctcctccactggaatgtcggctctctatgagaggggactttcatttcttgttcttattcttgcatttgtttgttcggttggttggttgataggctggctactacagtaatgtgcagtgcctagaatgtgccaggaaacacttaagaatttggtaactgcatgaaatgaatgaaaaagtaagaacacaagcccagcatcttgctccttcccatgacctggcttaacaaaccataggactatgcttcacgagaacctgctgctgatgctgcacttagggtcaggatttggagagtgtgacaccgaaggcgagagttcttccacggggggatcaactggtgatactgaatcagaagacagtgagggcaaggaaagtgaatgggactagtagggtgaacacttgtcacagaaagactattatatttcctagaaaatgaaaacagctacaacctaaagcatgcctcagtgagcagatcagagtggagaggagaaaaagaaaaagaaaagcaaagaataattatagtatgaagaatgcatgacatctgtgccttctcccaagagactgggcctaaggaagagcctgaggacattctatgaaatgctgaaatcatatgcagaattttgcaggaatatgcatattgctggaataaagatccataactttcaccagcttctcaaaatagcccctgatcgaaatgttagaggaacgctaacttacacaagaatgccctaattccttttatttccacttatatccatttattaagtgcctattaccatatctcaccaaattctaagacaccaacaattccaagacacagcgttattttatgcagcatgtcagttccgctatgacatgccattggttgtaaggcaaatgctaatttcagagatgctaaaaatgcaaaacgatgtgaggcttagaagctacaaataacagtatatgtcaagctctgttgctagtccctttacatatgttatctgagtcctagtgtgaaaaatgttattattcaattataattacaaatgaagacaaagccagaattccaaggtgagttccaacctaggtctgtctgaaagcctccacaccagcacaccacctcccagcaaagatatggctcccacatcggcagaccttataacgaagtacagaacaagaacctctaaacaatcaagctacagacaggtaatgagagttgggtatcaaatgatcacagaagcacccagcttgtgtctggagcaatccttcaaacaaacttccaaatctcccgaagacagtttcacatttattattctaaggagcctctgctctttcacctactttatagctccctctcacttcaataaactacttaagtggaagttaatgatccagaacatatagtgctctgtgttgaaaggggaacttaggaacaaaaggtgcatgattccttgtcaatgttaaaacacatccctattatcaaaggattgacgaaagcaggtcctggaaggttggggttgagatgtgtgcataagcacatgtgtgcacatgctacagggtgagaagaaagaggcctcgaggaataaaaataaccatttcactggatgtcttcacaaacaggatatgctgccacttccctaaggagcttttaaggagctcaatgagtagaactactgccaggagagaaccagaaagaaatcaccccaagaaaacactaaaccctggtcaggcatggtggctcatgcctataatcccagcactttgggaggctgaggtggccagatcacttaaggtcaagagtttgagaccagcctggccaacatggcaaaaccccatatctattaaaaacacaaaaattatccaggtgtggtggtgcacacctgtagtccccgctactcgggaggctgaggcacgagaattccttgaacccgggaggcggaggttgcagtgagctgagagtgcgccaccagcctgggtgatagagtgggactccttctcaaaaaaaaaaaaaaaaaaaaaaaaaaaaaacacacagaaaatacgaaaccccctctccccacactctccccaattttgctttgtatggtgatttgggtgtgattttatcttatcagtcagctctttcttgtcattttctatctaacactgaacaagcctagtggtagattgtaatagctgtttacaattactcaatcctcccctttgctgtaagacttatacatccctgcacaatgtcatacactgtgtggggctatggaccaccctgccccatggtcagggttggacatgtgagttgcatgggccaataggacccagtggatgtgaagctcactacatccaagcaggagttttaaggagtatcataaacaggtatggccaatgtggactggccctgagtctcagaattacaatgcatatgaagcagaaccatggcctgcagcctgcatatatacaaagagccactgagatgtgggattgcatgcaaaaaattagtaccagaagtgggatatgccataacagataaaatacaaggcataagctttggagctgggcagtgaaaggtatggaaactgtcactacaggatagagaaatagtgacccgtgatccagcagtaacacatttagtaaaactgcccctgtgatcacttcgaaggcaggagttgcaatgaacgaatgtgtagctttaggtgacaaggtcgcaaaacagaacattgctagggggatttggttactattaggtccatttgacgaagtactacaataaagagacgagctcagaaaagagttagctggttttccaataggattgaggcgggaaaaaaagaaaattaggaaatttgggacttaacaattgcaagatacaatgatttctcatctcctataaataaagaaaaaaaatgggccagacgcagtggctcacacctataatcccaacactctgggaggctgaggcgggctgatcttttgagcccaggagttcaagaccagcccaaacaatatggcgaagacttgtcgctacaacaaatttttaaaaattacccaggcacagtggcgtgtgcctgtaatcccaggtactagggaagctgaggtgggaggatcacttgagcccgggctatcaaggctgcagtgagccaaatggcaccactgcactccagcatgggtgacagagtgagaccccgtctcaaaaaaaaaaaaaaaaattttttttttttttttaaggaaagatgattaagacctagcctcaggacacagacaaaactaagggcacgttaaagtctctaaaggaattaagacacccccacctcgccctaccctaaccctagtaaatccttttagttgagcaaaattgctacaggaaaagtgattagtgacatggtctcacagaaacctgataagctcaaagtggcctgtaattaaatccagaaggagagatatgtctggtaaatagttacctcaaaagaggtgtaggtgtggctactggcccagggagtaactaaaatcaaatggaaataaaaattgatcattgtttagcatgaatgatatccccaaaagagacaccagcctggtctaaaagagactgtgaccacaggggacctaaaacaacttttggcaccccaaattgctataagcaggaagtagcctgagaaagctaccaagtccccaatgaagatatattctctaatactttttcaggtgtgtccgaacaggatgatcaaaaaggaaaaatctcccagagggagaagtcaaaagtcagagagaggccaggcacggtggctcacacctgtaatcccagcaccttgggaggccaaggcgggtggatcacgaggtcaggagttcgagaccagcctggccaacatagtgaaaccccgtctctactacaaatacaaaaattagccaggcatggtggcgtgcacctgtagtcccagctgctcgggaggctgaggccagagaaacacttgaacctgggagtcagaggttgcagtgagccgagattgtgccactgcactccagcctgggtgacagagtgagactccatttcaaaaaaaaaaaaaaaaaaaagccatagagaacaatggatttgagagcttctcatttgaggagaattccctatcccaaggcaggtgggcctctcatgctgtccagtggaatttcaggatggccatgtggatgcgcttctttctcttttgaaatacaagtgctcactggggttggcctattcctgttcttccacgacggacatgtggaccaggtcacttattttggttcacagctctctagatgaacagcaactaaatccagacctgctgatagaatctcatgagatcctgaaattcacacctgattccatgattacatgcgaatttttaggtatcttccatgagtcagaaatgaatttatgtcgtatataaatatacaaaatgatatataagatgattatttatgaccaggagggaagactgtagcagactgtattatacagtcatcccttggtatccgtagggatacctcctccctcccacagataccaagatctgctgatcaagtcccttgagccagctcttcatatctgtgtgttcctcaccacggatgcagaaggcctactctattcacaattattcatgtctccctccccttagtagatgtttatgtccccacctggaattgcagtacctgcctattggccaagcatacttccctgtacaatgtcagactttgccatatgatttgttaagcaacagaatgtgaatggatgtgaacactccacatccaagcagaattcttcaaggacgtcatgagtttccaccaattctctaattcttcccctccaccatgacattgcacatggccacaggggctgctgtttcagcctggaatccagaaggagaaaacaatgtgacagagatacagccaacctgcagcctgcatgttatttggaagcaaaataaaccttcaggatggcaaaccactgagatttgaggtttccttgctgtgaggcaaagctgacttaagcagcctgttccacccagacaactgaaatcaatgcttaaactcttagcaatacacaatctaatgcaaggaatatgcctggggtcccatgtgagccctcaggcttttaaatcctcatctttcctgggaaggagacatagagctcaattggttccatataaatgcttcttcaacttttgagtaaattccatcatctttgtgagccatctaacagtgaaagtattaacaatgaaattttaaaaaatcaaatcataatttccttttaaccagccatgctttgaatgacaaatatgtagagagtgagtttgttctcatctctcttctcactgcattcttactgtagcctctcacctaaccttgttggctccagagaccaaaagaaagtcagctaaagccacaaaggccaaatggacatgagaaaatgtctgaaaatgcaatatcagggattgtgtttgtcttgtgaagtcctttttgcccctcagggaaaaatgactggaggctcctctgacttcggagtaattgctttgaatgttttgggggaagatattttttctggggatgttgctgttgttgctaaaatgatgtccatccagaaaaacataagattgcctttgtttttaaacttgattataaaccagccctgagaagccttctaagagacttccataagtcttttgaataatgccatcattccaagttgaccatttccagggagcccaatctcgtttgccagatgagttctgccgtgtttgttcacataccagctttattacgttttaattagttgttatctttgaccccaaaaagggattcccgagcacctcagaatggagctcacaggcactggtaggccttagtggccctttctgctcctgaccccagggggacacctggggatcaagctgaggtgagaagcagactcaaagtcttctgttcacagataaatgccccacgtgaccttgcacgggaattactgaataaaagagaccactaccctgatttgaacagcaccagacacagagctgtgaaagaaaatgcctcttacagatgacaatgtccggttgcccagtcctggatttgttttatttatttactgagacagagtctccctctgtcgcccaggctggagtgcagtggtgtgatcttagctcacagcaacctccacctcctgggtgcaagcagttctcctgcctcagcctcccgagtaggtgggactacaggcgcacaccaccatgcccagctaacttttatttttatttttggtagagataaaaaaaaaatggggtttcgccatgttggccaggctgctcttgaattcctcctctcaagtgatccacgcaccttggcctcccaaagtgctgggattacaggcatgagtcactgcgcccagtcccagccctggatttgaaccagtgttcactgaagcatttccaagcctgttgttgtgccttcaggtatatgaaattcaacacatattctaaaaaggaccttgccaatgttcagtagaatggaaggccatcccatgagtttcagaaacactgatgctgctttaaaacaaaaaactcccggtgattataaggcttacctggagtatctcaaatatttcagtagcgaaaattcaaagacaaggaccagcaggaatgccaattccatgttgcaatcacgcctccccacccacaagcatgttattagtgtgtgcttccaatgcataattacctttcattttcccatagaatttcaggaaaaaagagcacagggctcagatggtttgtgaaatcaataggtgatttcatctcttacatgcaaaaataatcagttctattgagaaggaaatgtatacacacacacacacatacacacacacactacacacacacacactggaaagcccacattcaacagtcaaggtcacacacacaggaaatattcatgaaaagggaacatttgtagtatcatcctgagccatatagcacagtccaaagtacatgggttaataaagggttaataaaggaagaaaccatctcactctcaataaggctgaatttgatgtgctcaaataacactgattgctccaaaaaaaaagataaaattcctacaaagaggaggatcccaggcctaacgattggattcttttctagacaactgtaaccaccctctggacactataaaagaaaacaagtatccaaaatagcaggatgactatttgtaattactgtgtaattgttggttttacatgtctgtctcttcctgggcttagtgaaggcagagaccaagttcactaattggattcagccaaggagagcagttggctccatgaagtatgaatgaacaaatgaactaatgaaaaaaagaacacgtaagttctgtaccaaagaaagaggaaagaaaaccatgaatcctggtagtaccaatcctgattctatcccacctgccagcaaacaagaaaacaaagggaccatcaggaattcttcatttagtccaagctctgaaaagagaaaataattccaaaatgtcatattaagaaggtaaggaagacatgagaatttgaatggaagaaaacagagcagtgggtgggaaaaagtggagactgaaatcttacaaccaggaagtgtaggctgtggctttgaaggaaaaaaaaattgaatttccaggttcccagggccctgatagttgattctctccttcactctcctgctttgagtctacgtcaatagactctcacagcctgaacctccctggccgtacctcaagcattagagcaagattgaaaaggcttctagatagaggtgatacaaacaaagggaagtgcgtgcctctgggaaccgagcaagagttttcatcaccaaggatctttggaccctgacaaaaccacaggtaggcttcattcatttcactcagtcaacagacatgccctgagcacctgcttcatgccaggcactgcactgggccagcccagaagcagtaggaagtcgaatgttaaatgcctgtgaacccgcattggtgtgctttgctggggaaagggtctccagcaacagtctgtagccaggggtgatggccaggggcagagcgaacccacagagcctcccagtgcacactgcaaaggtaccccttcctctacacagacccagcctggccccaggctgtctactccacagcagaatctcagctggaattcaaactccttgggtccagtgtccttgtgagagacccatcctgccctaccctatctgctcccttgtagacagccctctagcgaccatcagaagtgtctggggcatttctgccccatgcacacattgacggggggtactacaggcacttaggggctgcggaccagcagtgctaagcatgctgcaatatacaagacatggctaccccataaagaactggcccgccccaaatgccaataacccaatagtgtgtggtttttatcgggtgctcgggtagtctcctttccacaaaacggtcaaggtcaatgtgctaaggatgacaggccaggggtcatcatggtgagagcccaaataaggaaggagtgagcagccacttcacggagtctacacaggcatcgctgcagccttggaagatctgctacccaattgtcagccaacaattctattcaattaaaaaattcccaaatattgaaacttcatattttaagattaagggtgcaaattttttttcttaaagggagaaaaataggaatcaaggccctttgatagtcatagcagacgactcccttcccctccagacctctccagttgtgccccgggggtcttgctacccttggaaactggatttaacttttgttaagcactctatagaataaagaaaagaactgccaattggttctaagaagacactgtgcttagaaaacagggcacatcgctgtgttaaatgtatggtactgaagagtttcctccagggaaagacaatgtgtttgtctgcctcaatgtacccaggggaaagcaacactgaaatgtccctgactttgcgaggatattaaatggggatccaaagtagaggcatggaaaacagaacttctgtagccccttcctagaaatctcctgacttttaaaatacagtttctgagttgaaatgtcctgttctgcaggttgaaatatacgatcaaaacctgctttgtgtagccctctgcatacagcattttaaacaagcttctggagccctattactccctcatagcaggccagcagagaagccagggcagctcattagttctgggagagctgtttcaattacattccagttgtagcccttcctgttcccttgctttgttgttaaagttccacccgcaaatgctttcctccactggcccagtcctataaattggtgagctacaggggctgcttaatcccataactagcaaagacaggctctgaagtcttggtcagatcataggatcctgtcagataccagtacagagtctctaccctcatcctactgttcttgtccagcctgagacaggtctacggcagcaaagggaagagcagcaccattaagaatcctcaagttgagtagtactggaacataaggttctgaggaaaagaaaatgaagatggcaaatcttctttactccctggctgagacacacagaagaagcgactacagtttgacactaagtggttaataactctaatcaagcaggctggatgaggggctgaaggattgtcacagaggcactgagaagggtggcctcaaggagaggcttgtgttccataataaatctcacggaagcatctagactggtcacttccatcctgaatgtatggtggggccctagcaacagaccagtggctgagtttatttagcactgtaggctaatgggcttccactgtgtaagtcaacctaaaccaagcctagaggagaacttcacccagatctcgttttccaaagagagggaaggaccccagggtggcatctacccacatgggtctccatacaaagaaagaagacagggccccagaagagctcttccaattcctggtaccaaccacccaggaaatgctgcactggggctgcacgtggcagccctgggtccaagagagcctgagagaattcttcaaggagctgctgatgcttagaagtgagagagaggctgggggacctcactccagccttggatagatggaagaggggcagatcacctgaaacagaagacaaagaggagtacaggcccaaaaagagaggtacagagagagctgcaaaggagtgagtgaaagagaccaagagaaatggagagagcaagaaaaaagacaagacgagatgaaaccaaacaggaagagatgccttgttaaccaagtcgagaagtactggtggactgcagaagcgagaggaaaaggttaccatggcaacaccttgcagaaagcgtaggctgtgtagctgagtgagcccagccaagagagctgcagccgccaatggcctcacctgctactgcatctgttcacctgtgggactgtgcctcgaaggctatgcccaagctcccactccccatctccaagatctcagcccagaacccgctctccgttcatccgctgccccaaattttgtgtcacatgatcccttcccaaatgcaccagatagacagaggaggctggggagccatgggctcagctgcccggccccctccccaggtgtccttattcttggttcaaggttgaggaatcttggaacatgacgaaagtcttagcaagttactcaactcaaactttcacactgcacaacaagcctctctgtaacttccctgaccactggtcaccacaactctgcttgaatcctttcagtgacagggagctcagcccactgcatgactcaaatgcttacgacttcagctttcattctctgatctaagatcttgctctacaactcggtagaggcaagggggaagatgaacaaagtccactgtgactagtgaaccatgagccatgctcctaccatatgctgtgattcaacccccaaccccaggccctgctctcaccacagacatgcacgtcttctacacctctcactgcaattctctataatttatcacatcgattttatagtatatttttcgttaacctcacatttgtacatccaggctccatgagctctttggctatttttactgttgtccagacagaataactaacattcattgagagcatacaatatactaggcaccattctaagcattttacatgtattcacttagcctatcttcccaaaactccaacgtctagcagccactaaggagctgagtcagaatttaaatccagtttctttagggatttatctttcctcttctacctgaagaatgacctgttcttttattattattattattatactttaagttctgggttacatgtgcagaacatgcagttttgttacataggtatacacatgccatggtggtttgctgcacccatcaacccgtcacctacattaggtatttctcctaatgttatccctcccctaccccccaccccccacaggccccggtgtgtgatgttcccctccctgtttctatgaaacaacctgttcttttggtatggattcctccatatccctgattcagagagtgttcggacccaaatgtgctcaatgactcaataagaatccacacctgaaccaaaacattctccaaagtttccaatatgggcatcaaaatccccacggtctgggccaaaaaattcctacatccaggctccatgagctctttggctatttttactgttgtccaaacagaataacaactaacattcattgagagcatacaatatactaggcaccattctaagcattttacatgtattcgcttagcctatcttcccaaaactccaacatctagcagccgctaaggagtcgagtcagaattcaaacccagtaagtctgactccagaacttattctctgaactccaaatctataccatttctatattgtgacatctttcaggacagtggtggcttttcaaatatgcataccgttcatctaccgaaaacctacaggtaacatcacactcaatgtgaaacactcaatgattttcccctaacatcagaaataaggcaagactgtctgctcttactcctcccttcaacattatactgcaagtcttagccagtacaatcaggtaagaaaatgaaattaatagcatacagattgaaaggaagatataaaactgtcactattcatagacatgacagaaaattccaaggaatctaccaaaaaattcttagaaccaataaatgagtttagtgaggttggaggatacagggctagcacatacaaagtcaattatatttctatatactagcaatgagcaattagaaatttaaaatacagtataatttaaaatagtaccataaaacacttagaggtataaatctaaccaacggtagagtatgtatgatgaagaccacaaaacactgataaaggaaatcaaagactttggagaatataccatgttcataaaatggaaaactctatatttattaagatgtcaatttcctccaaattggtttatggattcagtgcaaccccagtcaaaatcccattgggatttgtttttctgagatggagtcttgctttgtcgcccaagccagagtgcaggggtgcaatctctgctcactgcaacctccgcctcccgggttcaagcgattatctagcctcagcctcctaagtagctgggattacaggcgcgcaccaccaaacccagctaagttttgtatttttagtaaagatggggtttcaccatgttggccaggctggtctcaaactcctgacctcaaacgatccacccgactcagcctcccaaagtgctgggattacaggcgtgagccaccacgcctggtgccattaggattttttgtagatattggcaagctgattctaaaatgtgaaaggagaaaggatacgcacaaaaaccaatgaatcagaatgaagggtccaaaaacagaaccaaacaaatatggctcacgaactttttacaaaagcgaaaggttaattcaatggagaaaatacagtcttttcaataaatgctgctgggacaatttaacatccatatgaaaaaaaaaaactcaaccttgaactctacctgacaccatatttttttgaaacttcaaatagatagtagacttaaatgtaaaacgtaaaacttttagaaaaaaaaaataggagaaaacctttgcaaacttaagttatgcaaaaaattcttagacgtaacaccaaaagcacaattcataaaacaaaaaaaaagaaaaactgataaattggcagttcatcaagattaaaaactttcgatctccaaaggcactgttaagaagagggaaaggcaagccagggactgggagaaaaagaaatgcaaatcacatatctgacaaaggtcctctatgcagaatacagaaaaagaactctcggggccgggcacagtggctcacacttgtagttccagcactttgggaggctgaggcaagtggatcacctgaggtcaggagttcaagaccagcctgaccaatatggtgaaaccccgtctctactagaaatacaaaaattagccaggcagggtggcgtgtgcctgtagtcccagctactcgggtggctgaggcaggagaattgcttgaacctgggacgcggaggttgctgtgagccgagattgcgccactgcactccagcctgggcaacagagccacactccatctcaaaataaaaagcctctcaaaactctaccataattaaacaaatggattaaaaaacaagcaaaagattttgacaccaaagaagatgtacagatggcaaatgagcacatgaaaagatgctcgacatcattagtcattagggaaatacaaatgaaagtcaccagagaccactactacactcattagaatggctcaagttttaaaaacaaaacaaaacaaaaaagtgatgaggccaagggctagtgagggtgcagagcaactagaactctgctgggactgaagaacggcttatccgctttagaaaacggtttggaggtttcctatcacatgacccagccatctcactcccgggtatttagccaggagaaatgtaaacatatgtttacacaaaagcctgtatgccaatattgatagacgtttcattcataattgctgaaaaatcaggaaacaacacaaatgtccttcaactggtgaaagtaaacaaattgtggtgtatccacacgatggaatgctactcagccttaaaaaggaacacgctgttgacacttgcaacataatgaagttctctgaaatgcatgacgccaagtagaaagaagttagatccaaaaggctacatactgcatgagtccatttaggtgacattctggaagaggcaaaaatataggggcagagaacagctcagaggtcaccagaggttaaacaaaagggaaacagggataggttgagggtagggtttaactacaaggggccaagaggctgctcaagggaatatggggaggtgatggaactctcctatggtgatggttacagatctgtgcatttcttaaaaactcgtggaactgtactccaaaagaatgagctttatgatatattaatttaaagaataaatttttaaaaatattcatgtcctttatcacctgagcaattctttttgagacagagtctcgctctgcagcccaggctggagtgcagtggcacgatcttggctcactgctgcctctacctcccgggtcccggttcaagcaattctcctgcctcagcctcctgagtagctgggattacaggcacgcgccaccatgcccagctaattttttttgtattttcgtagacacggggtttcaccatgttggccaggctggtcttgaactcctgacctcgtgatccacccgcctcagcctcccaaagtgctgggattacaggcatgagccactgtgcctggctatcacctcagcaattcttgaaatggccatgaaggctgggcacagtggctcacacctataatcccagcactttgggaggccaaggcagggggatcgcttgagctaaggagtttgagaccagcctggccaacatggcgaaaccctgtccctactgaaaaatacaaaaatcagctgagtgtggtggtattcgcctgtaatcccagctacataggaaactgaggcacggaaatcatttgaacccaggaggcagacgttgtggtgagccgagatcacgtcactgcattccagcctgggcgacagagtgagatgctatctccaaaacaagcaaacaaaaaagaaatgaccagggagcttggactgtcacaatttgtatttcacagggtttttgagaccaagttgcacattttccgagatgatcccaatgtgcagtgtggcttatactaatgaactaatgaatcctggcatccttgttttggtgagaccacagggtataactacaggttatggcagtatctcatctgaaaaaaagtaaaaaaaaaaaaaaaaaaaaaaaaaaaaaaattcccctggcaattacccggggaacaaacaggagatcctaggaaaggcaatggaaatttggaaggcaagtcttggccgggcctcactttctttatccaaggtggtggaaatgacctctctctgggcaggcagatctgaagacctgagaaaaaccaaacctcaaactctgcctctaaagacatggaactaagtaagaacctagccctggagccagacagggactctccctggagaacagcagttcccaacctttttggcaccagggactggttttatggaagataatttttctacacataggaggtggggggtagggggtggtttcaggatgaaaccgttccaccctccgatcatcagacattagattctcataaggaaggcgcgacctagatccctcacgtgtgccgttcacaacagggttctcgctcctgtgagaatctaatgctgctgttgatctggctggactcagagctcaggcagtaatgctcacttgctcaccactcacctcccactgcatagcccagttcctaacaggccacagacccatactggtctgctgcccaggggttggggacccttgcggtagagggtcccaagaggttagcaagcgccagtgggctctgagggctgcctttgccatggtcagctgatatccttctctctttgttatttactatatttgctcatcctcataccttgaataaaatctcactggcagtcagatacattggctcacgcctgtaatcccagcactttgggaggccgaggcgggtggatcgcctgagctcaggagttcaagaccagcctggccaacatggtgaaaccacccccctccctggtatctactaaaaaaagtacaaaaattagctgggcatggtagcgcatgcctgtaatcccagctactccggagactgaggcaggagaatcgcttgaacctgggaggcggaggttgcagtgagccgagattgcgccactgcacttcagtctgggcaacagagagagagagtccgtctaaacaaacaaacaaaaaataaataaataaataataaatctcactggccagctggcctcagaaggtctgtaaggcagtaaaggcatgatttgcgctacagaggagttaggaaagctggcccactaaggccagcacagtggtgggacccacttatatgattgctagtggtttatatagctttcatgctggaccatacaaaacgacctcatatttgtttccccaggagggctgaatctccttgaaggcacgtgtctcctggttttatgtgtacgacagggccttccctactggaaagggcacaaccaattcactaagattgacttgagcaaacctcaccaaggcagaaaccgctaggtgagcctggtctcctgggggaatagagcagagacttctggctcaccacatctaagagctgtaagagaccatatcatgcacttctctcctctgccatcctcccggaatgcctctgcctcccaacaagctcatggtgagtttgtgtaatcaagaagttggcagacagagagagtgaattctgtttcagagacctaagctgggagttgctggcaaatccctgaacatccagcttcaaaatgttacgaccctcaaaatcacgttgcaactctgaaaatcatgtttccttgagacaactgatttaattttcagatatgcagagctattttctttctctggactcaggagggaaaatacaccagagagaagaaagcagaacagaatgctagcatacctgccacccagaaaggagacggagggttgaacaggaaaaagcaaatgcaggtcgagtggagcatatccctgattcctttctttagggaagtgttacatgggccccatcccaaaggttagcgctgttctgtacttcacgcaggttcaaagcccagttccacatcttcctcctaaccctttccttctcgaaggctgactattccagtaactgctgtcaatttcctcccagcttcacaggctcaaatccagccttctgttccttattaggcacttttagtaacaggcaaaaggttgacatgggagtgaataaatgcaaaggactcctaaagatcccaagcactcaaaaccaacgtgccaccctgttgcatccccagaaggagcttctgcaaaaataactgctgcaaaacaaagcaaaataataatatgaaaagcgcccaggctgtgtggcttcaggcacagactcttaaatcttcgacaaataaaagcctggcaggaatatcctaatgaaggctgctgctacccaagccacttgtctgttctttctgtttccctaaagcacattaaaaacacattttccagtttaatagacttatgagctgaaatgaatgtgtcagaatgcttataaatatgatagaacctgctaaccaagcaaatgttaaattttgcataaggagactgtatccctaactcctcagtagatacttaatgaatatttcaaacaaagcaccccagcagctgctctaagggctccagatgaattaagtggacttttattactgccaggactcgtcctcttgcttcctctcattttatccatcttcctcctttgtataagacaaacatggcgcctcagacgaaccaagctcctgaagtctggtcacggagtgatcagagtatggggttggtcaatgtacagtgctgaatactgtcccccgccaaaattcatgtctagccagaacctcagaatatgaccttacctaggcagggcgtggtggctcacgcctataatcccagcactccgggaggccgaggtgggtgggtcacctgaggtcaggagttcgaaaccagcctggccaacatggtgaaaccccatctttactaaaaatacaaaaattagctgggggtagtggcgtacacctgtttccagctactcaggaggctgaggcaggagaactgcttgaacccgggaggcggaggttgcagtgagctgagattgcaccactgcactccagcctggtgacagagtaaggttccgtctcgaaaaaaaaaaaagaatatgaccttacctagaaattgggtctttgcagatgtaattagttaagaagcagtcatacaggattaagtgagccctaaatccaatgactggtgtctttatgagacaaaggatacggagttttggacatagacacacttcacagacacacacagggacgaaggtcacaatgtgggcagagattgaattgatgcagctacaagccaggaaacgctgggggccaaaagaagttagaaaatttccctagaattttcgagagagtgtggccctgctgacaccttgatctcagacttccggcctccaaaactgtaagggaatacgtttctgctgttttaagcagctctgtatagtacaagataaccatcccttctctgaagggaccagagtgtttcagatttttcagattttggaatatttgcattattttactggcatcatttaccagttgagcatcccaaatctgaaaatgtgaaatccaaaatgttccaaggagcatttcctttgagcatcatgtcagcgttcaaaaggttttggatttgggagcatttcagatcttggattttcagatttgagatgctcaatatgtactttgttgtgacagcaacaggaaacttacacagtcaggagagaacttctacacattcagatgtgtattgcaattatttccccagaagttaactgagccgactgtttcaggtgacagtggaagcggtcatccctttaacggtgccatccctttaacttcatgatagcatagatgtacacctgccagcagtcttaaaagatcagacttagagccatctgactttttttttttttttgagatggagttttgctcttgtcgcccaggctggagtgcaatggcgtggtctcagctcactgtaacctctacctcccaggttcaagtgattctcctgccttagcctcccacgtagctgggattacaggcatgtgccaacacgctcggctaatttttgcatttttagtagagacggggtttcaccatgttgaccaggctggtctcgaactcctgaccttaggtggtccacctgcctcggcctcccgaagtgctgggattacaggcgtgagccactgcgcccggccctgactttctttctcgctgcactctttgagtaacttttcaacttcattctactcttttttcatcctgcatagtctgcattcccagcccatgcaggtatgaggctaacgtaaggaggcagccatgcagtgagagaatctagaaggcagaaacaaagagaactcctttctcctgacacctggaattccttgaagctaactactatctctggaagacaacttctcaaaaaattgttcagcgcaactatggcctgaatcacgtcccccgcttcaaatttctatgttgaagtcctaacgcccagtacctaagaatgtaactgtaagggagataggatttttaaagtgttaataaggttaaaatgaggtcattagagtgggccctaatccaatatgactggtgtccttataagaaaaggagattgggacaccgacaggcacagaggaaagaccacgctttgggaggccgaggtgggtggatagcttgagcccaggagttcaagaccagcctgggcaacacggcaaaatgccatctctacaaaaaaatacaaaaattagccaggtgtggtggcgcactcctgtagtcccagctactccgggggctgaggtgagaggatagcttgagcccaggaggttgaggctacagtgagccatgatcgcaccactgcactccagcctgggtgacacagtgagactctgtctcgataaaaagacagaccatgtgaagccacagggagacgacagccatctaccagccaaggagaaaggcctcagaagaaaccgaccaatcttgccaactattagtcttggacttccagcctccagaactgtgaaaaaaataaatttctgcagtttaagccacccggtttgtggtattttgctacagcagccctagcaaacacatgtgagtgccaaattgcctctagcctcatgccacatgaaaatttgctctgaaattactgcctggcttagaaaatcaggactgtgtttttttttttttttaaaaggcagaagcagataaagtgctatttgagtgctccatattaggccaaatagaacactcttcagaagcaaaagactctataaagcgtacccaccctgataatgttcccatgagctaggacactaacggtctcatgctgcctgcacagatccctgtccaagaaggtatctctgcattgtttatttaatatccagatgcgaaaaagcttctggcagttattattattgagccctttgccctcctgcaaaatatttttgtgcggcacattttaacgctggtttgcttcattctatttatttatttatttatttatttatttatttactgagacagagtctcactctgtcgcccaggctggagtgcagtggcacaatctcagctcactgcagcctctgcctcctgggttcaagtgattctcctgcctcagcctcccaagtagctatgattacaggcatgtgccaccacgcctggctaatttttgtattattattattttttttttagtagagacaggggtttcaccatgttggccaggctggtctcgaactcctgacctgaggtgatccacctgcctcggcctcccaaagtgctgggattacacgtgcattctcacacttcaaatgaagaaacccaggttacgggtcttagcccagaaaggaggtagcagccagggcctacctatttttcagttcctagataactcctctcaattgggccaggacaagattttaaagtctcccctaaccaagcaggtacagggaaaaaaataaataaataaaactctgattgccaaaaccacatgccaagaaattatatctacatgaactgttgtgaaaatactctttcatttttagagatcttaccaataaaaagtcaaaattaataacatctcagagacttccccaaacacattatttcggaaacctagttataaacactcagaatttctcctaggagttacacctcactctcgatcaaatttaagatcactaaatttgactggaaatatcagtgacaaaaggaacatgtccttcaggaagacatggaaagttagaagatacagaaaaagaaaggtaataggaaccatgaagctgtttaaataagtcatctttgcttccgtaggcttaggctattccaagcagttttagcgccaaggaaacttgggagtggaatgtacgtggctgagcttatagcgagaaccagctgcttcagagaagagattgcatcccacactgcctggctgccctccctaagccccacacattatgtctaaaaaaatgcaatcctccaaagcctagccagtgtgaaaacccacctattgggttcattgttgaactagagaaaccgttcccagtcaacagacaaacacgtaagcagtagtaaaacatgaagtcaatgggccaatacctccctgttcttcagttcatcaaatctttttccaaaggcacctaagggaggatgtttaacagggaaaatgggagaaagggatgattccaaatacaagactgaaagaggacactgtgatacctggagaagagagagtgtcttgaggtggaagaaggggatcaaagagcaactgaactccatcgtgttcccgaacaggacaagccctggggttgctgatccggggttgggcacttgagaagcttgagctagaaaggaaaatcatctcctgcaagaccatttccacaggaagagtgccacgcagcacatcagaagcagaaccaataaggaattcaagattttagagtagaaaacaaagacactcagctaatggccagtgactgcagttctacaatctataatccacttgacacgagcttggcatcagtttcattttgcaaaacatggctttgataattgcatcagatctgcaaggctgtgtaggcagaattcttattgccaagtgaattttcctataagaatagggcattaagagaaaaatctgtttcttacctgagtgtcgtacggcttacgcttccctgacttgagtacccattcactttttcccccaacacttcagaaagatttacagaaaatgcacagatggcacctcacaactgaataatctcctaaagtaaatccacctcttgctctaccagaaaataatgccttctcctggtctttccacagatacacaaaatgataggcaattctcctatgctaatagaccgatgaaattcaccaataataatagtgatgacaaagttcactagtgaagagtatctataactgcatcagaccaatctggttcaacttttatgtaacaaagctgtgagctgcttttcagttgccatggaccctcaggtcatgtaacctaagcatgctcagatgaaccaagtgtacaaccacagggggaacctaagtgctgggacagaggagtgggactgaattaagaagcagacaccacatggcaggatccaggatccaatgagattgaactctggcatcaccccatgacaggatccaatcagataatgcctcctaacgtcacctcattgcaagatccaatcagatcacacctcattacttatgcttataaaacccaacccaacccccagctcagggagacagatttgggcattccctcctgtctccctgccagttgacttgactcccaataaagctgttcttctctcaaaagccagtgccacggtattggcctctgtgtgcatcgggcagcaagcccactgatgcttggtaacatttcaacttcctcccccagaacatactgcatatttaaatggggaaattaacaattagtaagagaatcaactgattcacttttaactaccttctctttagcctacagaggatgctatgaagaaaagaaaaaaaactcaacttgacagctgagtggggacaactgagacagagaagcccaagatcttgaacaacactgggtgtatgcagccatctggggtgtgatgaaatataacttatagtcccttgcctttcaaacacacacacacacatacacacacacacagactttgcataaaatgcaagaggctcgtgagtcctttggtactcatgcatggagcccagacataaagaactcctggcctcatttctagaatttactcaacaatataactgtccacagagatgtagatactaaaatgctctgtgccacattctttgcaatagcaaagcatcagaattaaccccatgggcatccagagagggctaattaggtagcatcatggccaataacaagaatgggatggatctatgagcacctcaggaaaaaaacacccaagggtaccgttaagtgcaaaaacatatgatacagaacaatgggtcaggtgtgattatagaaacatgataattctgaaaggatgcacaagaaactagaaacgatgtttgtgtctgagatggggggactagaccataagggatttgaaggtggaagaaaaattacttttaaccgatgtcattatatttttaattaaaagaaagctaattggagatggatggatggatggatggatggatgggagagagaatgaaagaaagagagactgatagatttaaaggaacttcttctggcctacctaagtcccaaaatatccccagccttgagaatagctgatatcagaaaacattgcacactaagacctaaataggaaagtatctcataaatgcttttcccagctcaggctgccgtcactgctgctgctcctcagagcagctgaactcctctcccagagtgtggcctttctagttcttcctctggtcgaaccaattatgggacattacaacagcagcaccaatatgatgttttaaaggctaatgttattcactaaatacccattaaacccatctccttgctccatttacagcaagcttaagggcaaatccagatggtacaaataatgcatattcaggctccatctgcatgaagccagttatcaaatagccattatcagttttggagtcctcaggtgcctgacacccacaggtgtgtccaggtgagaagaacagcgacctttcaagagatggctgggagatcatctctgtgcttccccaagagctgcatttgcttttgcagctgaacagctagcaacggttacaagggttgcttggtaacccggtaacaggctgtgcctagtgttcttgagcagggggactgggttacatctccctcccacacacctcactccgctaccacttaactctgggttggccaagaagacccagcagtacccagaggctgtcctgcagagccaactcccctgaccccgtcccggctgtgactccattggaaaatgtccatccaagggcttgccaatgtttaccttttttgactgacaggcactgaattcactgtaccaccttcccccgaccccaccagcccatggccctgaagatagaaaaatcagataaagtctggccaacttttataccctagagaagactcacaatcaggatcataaggtcttcaaaggggaacccaggagcccagcgcagtcatgttagtgaaaatagacagaaaaggcctgtggccttgtgttcagaactcagcatgaaaaatgacaagttttacttgaatacagtgctctactgtgtcaccagacagtccttgactatgttccagtaaaaagagaagatgatacctaaagcgttctgatgggtataagtgacaagtgtgattggaggcaggaggaagatttgtcattctaaccctctatgatttaagctcacattggatgaaatttttatttcctggttccatcccacgtaggaagttgtgggcggcagtgaggattaacccaaatggagaagacatttgagttctccatgaataattcatgcaggacataatctgaacacagataccagagccctggctgcagcatagctttaacttttgtacatttgctctccctaaggggtagagatcatcttagcatagagatggcaaaaagattcaattaaaatgccagcatggaaatgggaaaggactgttctccctgaaatcactcctgtgaacacagtgactggtcaccaatttgtttttccttaattcactcaggagagcactccacataagcgaggaggggcccattctccacagcatcctggcatggttttcgtccccggggtcttgcaggattaaatggggaacttctatataaatccaaaggggaaaaaaaggcatccaactctcctcatgctcactggcccttaaactagccaagtgtccttagtaaacaatgaggggcaagaaggagaggcgtctgaccccgaggctggaaaacaatgtattgcattccatcttcaacaacttctcaaagggcaacagcccactctgcatctctccccacccagcttcagtaattgctgtctgattcctcttgagggacgcattccctctaactcagagaaaaggcatgactatgctgtcagcatctttagcttttctggctccaaattgaatcagtgagagaaacgtccacagttggccaggtgcagtggctcatgcctgtaattccagcactttgggaagccgagacaggcagatcacctgaagtcaggagttcaagaccagcctggccaaattggtgaaacaccatctctactaaaagtacaaaaaattagccaggcatggacctgtagtcccagctacttgagaagtcgaggcaggagaatcccttgaacctgaaaggtggaagttgcagtgggctgagatggcgccactgcactccagcctgagcgacagagcaagactccatctcggggggaaaaaaaaaatccacagcagtctccccaggtaaatcaaaaagatgtaaattacaacacaaatgaaaaggagtattcagggttcatcagagagggggacactgagggacaaatgctggtactctctaacccaaagcagccccatcaccatcagagtgaccccactgtccacctgtccaagtcgaaaagatgatcaaaaggtaccgttaccttctgtagactaagcatgtggtttggacaacaaatgagaaatgaaggtgctgggccagatgccagtttagctccatgcagtagtagggtgagtgattcggagggataggacagtgctggcatttctctcactattcatcctaccaccagcccccacgtccatattgcctgactcagctcagtgtctgcagcaaagagcttgcctgaaagaagcccagctctacctatccggatggaaagttcactctcagggaagagcagcgcgggaccctcaggatcagacttcttcttcatcaacgtagagccgaagttcagtgccagggtcgtctgggggtcttctgctgcaccctgaaacaagaagcggtaacatcactagagcaccactactgtgttaattccccagatgcttctggctcacgggcgccaaggcaacttgccagtctctaccaagaccgccacagctgagccagtcctccggccaacccagttgccaggccatgctgggtcttcaggaagatgacaaactttccaggtataggactttagtggttacaaaaaagaaaaaaacaacacgatctaaaaagtcagtgctgatcctaaaaatggggaaaatatataccaggaaagattgggacccaaacaccaaaactccactgcaagcgtcatcgccgcacacacacaaaaccccactgcaagcgtcatcgcctcacacacacaaaaccccactgcaagcgtcatcgccgcacacataccaaaccccactgcaagcgtcatcgccgcacgcacacaaaaccccactgcaagcgtcatcgccgcacgcacacaaaaccccactgcaagcgtcatcgccgcacgcacacaaaaccccactgcaagcatcatcactgccgggcaaatgagcaatgaagttggttcctgatctatcaaaagaagtccatatggcaggttcacgtgaatggcagtctcagtacaggaaccacggtcaacttatttggaattcaccatctccacatcttcacgtgtcttatgagatcaaaagaggagatccaaacaaaaccatctcaaaggaaggaagcagtgcgagttgcagagaatgcacacatatttagagttaactccagatgaccttaaaacaatcatgtcattcttcagctttgtcctaactagttaagcactgatcagtttgactgtttcgcattaaccaggcaaaatcgtgcgtttgatcctcacatttatttgacaaatattaattaactgccaactctgtgtatatttagtgaaagagacaaagtcccggttcttctgaagcttgtgttccgcttgggagtaaataaatgaatccacaatggggtggtaagcttctcttccaaaggcatcatctggaagccccaaccccactgaccacttacaaatgcacaggatctcaacaggaacaacaaggcagaggagagactcaaccaactacacaagcacctccactttcatccaaacacctcaaagctaagggaagggaggcagaatcatctcaattggcaaaaaatagtagatatttcttgaaacctaggtgtctctgtctgttcaggctgccataaaataaaataccatacactgggcagctttttttttttttttttttttttttttttttttgagacagagtttcactctgtcacctaggctggagtgcagtggtgcaatctcagctcacagcaacctctgccccaccgtgttcaagcaattctcctgcctcagcctcccgagtagctgggatcacaggcactcaccaccacgccgggctaatctttgtgtttttagtggagatagggtttcaccatgttggccaggctggtctcaaactcctgacctcaagtgatccacctgcctcggcctcccaaagtgctgggattacaggtgtgggccactgcacccggccagcttttaaacaacagaaatgtatcacagtttctggaggcaggaaattccaatcaaggtaccagcacagtcagtgactggtgagagcctgcttcttggttcacgacggcacaggctagctatggaaggggcaatgggtctctttcacacgtctttcattacggcattaatcccactcatgagggttctaccctcataatctaatgatcacccaaaggtcccacctcctaatacaatcactgtggcagttaggatctcaacataggaattctgaggggatgcaaacattttcaggccacagcaccaagcagaaataggtccaaacaaacacaagttttcatttaaaacatgtgtctctaatgcgggagaggagaaggcttaaaatctaatcacataaatgcatccatttattttaaaaaatactaaaacaattttcttggataagttcctttcatgaaggaatctcacaaaagggataccaggctgctgtgacacacacacacacacacacacacacacacacacacacacacacaccccttcttgttttttcactgtcatgatgatgagagttaagaaagagaacctaatgattcagatcttttatttcattatctgcttccaaccaaatgttgaaaatgaacacatatgcccttcctctcatctattctcatttgtctagacatcgctactgtcatcacttatttgcgatgtcctctatgaatgtcttttaataaaggtgccaacacccccatgtaactttgtctcaactaaacaaacacacacaaaaaagcctcctgcccctgtttgagctacccttgtacaagttttcagtcccctttgggtatccacctcttctgtcacataaaggcagctgccctgcagtatcacggttaaggtagacctacagatggccagaatcctgggaacagagaggctttgggaaggccggtctctccctctgtagaaacccccctccctaaccctgctgacacctggtgtctgtgtgatatgccacgggccatggagtcacagctctttgtttgtttatatgctttaattatttctaattctacatctcctgctgacatccgaggaatcactgcagcaataaaagatatgtttcactatgaaagtatgtcagctgattttccttcctttgtcttctttctttttataatgtgattgatgcgtaactgggggaaggaataaaaggagaaccatttcattacagaagaaatgccgcagcattaatacgcattaagctgcaactgtgtatttgattgaagcccatctggtaaggtgcagcttacagagaccctggttttcatttagaacatttgttttcaattatgtgatttttgtcccccccacccagaagacactgagcactgggcattttggaatgtcataactggggggctgagcatgctgctgatatctctagtgggtagagaccacggatgctatgaaatattcaacaatgcataggacagcccccacaacagagaatgagccagggccaggcacagtggctcatgcctataatcccagcacttctgaaggccaaggtgggaggatcacttgagcccaggagttcgagaccagcctaggcaacatagtgaggccccatttcttaaaaaaaaaaaaaattagccaggtatgatggcacatgcctgtagtctcaagctacttgggaggctgtggcaggaggactgcttaagcccaggaaggcgaggctgcagtgggccaagatcacactactgcactccagcctgggcaacggagagtgaccctgttgcaaaaaaaaaaaaaaaaagccagcaaaatgtcaatagtgctgagcttcagatacctgctttagaaagagttacgatgatcaatcaggacgccatagctccctgtaatgctggaaactcacagaccctctttttactgtaaagagaagaatttcgctagtttctctaggaagactccctgctcaccttcacgcatcccatagatttctgttaagtgtcaactctgtatcagagatgctccaggtactggcaattcaaaaaagccaagtctcctgtcctcatgaatcctacattctccttcgagagacagatgataataaacccatcatgataaactaaaaaataagagtgtcaggtagtgataatgccaaaagaaaaataagccatatctgtaattcacagccatccaaaacattgcctggcacaaaccagaacctagcccatataatacaggctggtttctggtttgtgccgggtgatgttccaagcattttacatgtactagcccattattaactgtaaagacagtgttcctttagggaagatgccaagagaggtctttgtgggaagatggtatttgttcttcccttactttcaggtttttgctcaaacactgactccctcttcccctccatctcttttcacctttctatcaatctatattctgtgggttgcattgctttatttcggcgttttcggggcagggagacgagcactaagaaaatcccgccctaacttcacttagaagctgcccttttaaaagctagacagagatccgttatctccacctgtacccactcccgcctgtaccccccgcttcccccatgtgctccctccaacatttagccttcagaacaaccagggtcagctatgcagcgtgggagctacagaaagtatctccggagtaatgccaaggacagctccttcgctatctccatacctggcaaaacctccacatgcctctgatcccaggcactggcctcccagggctctttttagacacctttccaggattctcaacattcctccaactctcaattattgatagggaagaggaatacatccctctgaatttcaagaaacagcatggagggagaggccagctcgctttgctagctttatcatagcgtccctggcggtgggggaaagtcagaagctcctgctgtggcaaagtggctctcaacctgctgggctgacatgccccgcatatcccccacccccctgctgccatggagccccatctgctcactgggcatggggactgcaggttgagggcactggagctctttaccaggacacctaaaataaatacagccttggcccgtgcatgaggaaccaaggccctcagggagaaattccttctctacatccctctcttctttacttgatattgttgtttacatttctggtttggtttggtttgatttggttttcatctctgcaatgcctttctatccatattacctcactcaatccttatagccctgcaaggtcggcaaagtgcgagcgtgatccttcttagggcaaacacgtgaccaacgcaagctgttcttgactttccacagcagccccgacagtctgctctgctgcccatcagagggtcagtgagtcactctttcccatctccacaacacacagtgcttcaggtaggcctctggggctctgaatagttcaagtgtgctgtgtcaccttgcagctcccaaatgtcaaggtgtcaaatacaagggctctttctccagctgcaaggtcaccccctctccttctccattgttccctctcccgatcctctttccctgtccttcttcccgcatccccacccactccaaacccagctcagtacagaaagcagggtgtgggccaatggaggcatgaggtaccacccacccaccacccagggccacggaacttgagactcctgtcctcttagaatggaattattatcataatgattcttcttcttggtggggggccaatccctggctcggaataaacagagcaacttccacccactttggaaaggccatgcagaaaggcaggagctgaagaagaagaatagcactttccagaacaaaaagagaggaaatagagagaaaaagaaagaaagatgatgaaataatgtgaaggaggtgagggggcaggaggtaggaaagcagctctgcaacttgccttacattaaaccaaaaaggctgcacaaaacaatatgtatatctccttcaagaaataaaatcctggggctgtgcagtgtggcctgctgtcccaggcaggaggagggcaactgttagtggctgatgtctccagagccccccaaaagaaacaagtcacctgagaaacaggccagagcatcactgaagggacagagctacctgcatattaagtctacaagggcgaactaaggccccccctacaaagcacgttgggtgtcatagaaccgcagaccctgcagccctcaaaccttgctgcaagcagcttggtgcatctgctccaggtcccagtaccaaccttcaataggtcttaagtcccatcacctcctttctggctcttcctcactggggtgagtcattgctactaacaaccgtgtctgaggatggcaaaacaaagcaacctgtgatgattgtcagcgtctgggaggcaaacctgacctccgccaaacccgcacacaccttctatcgcacggattcaggacgggggagctctgttcattttgttctgaggtttcattcaactaaggctgtgatgaccctgcacgttgctggcccatgaagggcagtctcttcgtttttttaaattttgtatttgttatttttgagagacagagtctcactctgttgcccaggctggagtgcagtggtgtgatctcagctcactgcaacctctgcctccctaattaaagtgattctcctgtctcagcttcccagtagctgggattacaggtgcccgccaccatgcccggctaatatttgtatttttagtagaaacagggtttcaccatgttggccaggctggtctcaaactcctgacctcaagtgatccgaggaaggcagtctctttaattgaagcttgtcaacaagtcagagctccctgaggaaaggccaaggccaaggtcaggggactaattggtgccccctgccagctacagctacatggaagccaagtgttacacgccagtggaaaagggtacagggatctcaagaggagccacccaaggggcttgggacgtgcagttgccagggaaggggctggcgggtggcctgcctggggcccagcataggtgctgcctcctcccattccccagcctctgcctcctgccatcctcacttaaccccagacacacaaggcaacgttcaataattgatgctgtttttattactgagaagttgccataataatgacactcgtaacacaatcttttaaattattccacataatggaaaaaaaattaaatgtcgcccctgatcaacagtcagaatatggatggtgcttacataacacatgaccttctctcctcgggagcccggcaccaggcagctgcccagggccaggctggctcccggtgatgagcagccagctaagaagcaaacagggacacagagtggcacagacactgaggcagagggtacagtcctgcctcgggtgtcaggcaggtcaccgctgtcttctttgccctggttaacctatacattcagggatcatgggtcatagtcagaatccctaaagacaaggaggatgacggtttaagtacttggtctctcctggttttttaatgcaattcttgccttgtccaaagcactaggattgtacctctaactcagcttcagttcattccttgtacagtaataatgctatatccaatcagtggacagcaaggcaggttttcaagctttgaattattctacacttgaggtttttaaaatcttggccaaagaagcctgagctccttcctccaggaagccttcctagatgtactcaacctagtatggatcaaatgtactcccttccatcctcccctggtatcctgaataggctttaacttttcagttctcttttttttttttttttttttgtttgagactttcttgttctgtcgcccaagatggagtgcagtggtgcaatctcagctcactgcaacctctgtctcacgggttcaagcaattctcatgcctcagcctctcgagtagttgggactacaagcacgcaacaccacgtctggctaattttttttttttttttttcagtagagatgaggtttcaccatgttggccaggctggtctcacactcctgacctcaagtgatccatcctccgcagccttccaaagtgctgggattacaggcgtgagccgcagcgcccagctgacttttcagttttcttaagcatctcaaagccatgaggctcaaaatggcagctgtgtctcgcggccctactgtcagggcccagcacacggtctgtgttcaataattcaattaatttatctgaacgaactaaatgacagaggctccaaaataagagggaaatgttgcataatacagaacataccgatctagggtaaccacaagtggttaggccctgagaaaagagaggattggtgcacagaggggaagaaaaggcttaaaagaattaacgattttctagctaatgccaaaaagcgtgacgttccatccacccctgccgtctatcctcttgatgattaagataatcaatatcagccctgcgaccacatgaggacgggtagatacctatcctatgactccccagtgaaagcttccatctccatcctcctttctggcataaatagtcagagtgggacagcctagctcactcccttttaaggtaagatctttccaccctgaagcccacgatccctccaatgccacatcttccagcttcgtccccatcaccttcatgaccttaacatgaaacttcacaatggtggaagttaattacgaacttctagctatatttaagctacataagtacgccattactcaaactatcttgtgagagacaaaaccttttcctagtcctgatgccaaagttctattcaaaatcaagcgtatttaagcacataaaacagatttgaaagcatcacacagctctgcagagacacagctctatgagaatctgcagatagccctccagtagccattccaggtaagcagccctgagcttgtattccaaagagctaggtctcctactagcacggctgacagagaggtagagcttggcagagttttccaaagcattatgctttttcttttcgctcaaaaatatcattttccttaaaacagtaacagaaatccaaaagaacacaagtaaccgaagtataatgaagtatttcttttctaatcctcgatgattatccaacactcttaatctaatcctagacttagtcccagactttattaaaatgcacccatataatccactctgagctttttctggcttctcaacagactgagaacctccagctggtgtttatcaataaagtttttctgacctatgttatccttttggaggatattagatgccttcaaaaatccatcaaaagccacaatttctctttcctaaaaatgtgtatgtatcgcacaactattgctaggtagcaaaacaccccaaaacttagtggtttaaaaaaacagccggttattattgttctatggtcaactgggcatggctgctcatccacctgggctcactggtgcatctgaggtcagctggtggctcatcgaggggctggatggtctaagatggcacatgcacctggcagccagcaggcagttggccaggagttgactggaaaacactgattcttcttggtggggcctgtcatcttccagcagactagatggagctcattcgtacgctaacctcagcatccaatgtcaaatgcttttcaagtctctacatcacagaggccaaagcatcatcccagtggccaaagcaagtaaatgggtatccacattgaagggttggatgaatcaatggtactttttgttgggaggacctgcaatgtcacattgtcaggtacggatgctgacggggaaatttgtggctattttgccatttattgcagtacatatgcacagacatacaaaatgttgtgtgtaatatgaggaaccccaggaattccctgcagctctccatggatccagactagaaacaattgctttagcttaaacccacaaactcaatctcattcacttaaaatagggcttctccagtgaggacacaaggatacattcttagaggtctgaaagttttacacagattttttaaaatttcggccaggcgccgcagctcatgcctgtaatcccagcactttgggaggccaaggcagatggatcgcctcaggtcaaaagttcgagaacagtctggccaacatggcaaaatcccatctctactaaaaatataaaaatcagccaggcgtggtagtgcacacttgtagtcccagctactggggaggctgaggcaggagaatctcttgaacccaggagacagaggttgcagtgacccaagatggtgccactgcactccagcctgggcgacaaagggagaccctgtctcaaaaaaaaaaaacaaacaaaaattagccaggcgtgatggcttgcgcctataatcccagctattcaggaggctaaggcaggagaatcgcttgaacctagaggggtgaggaggttacagggagctgagattgcaccacttcactccagcctgggcgaaagagcaaaactccgtctcaacatcatcaacaacaaaaatagacacatagaccgatggaacagaatagaaaccccagaaataaacccaaatacttaaagccaactgatcttctacaaagccaacaaaaacataaagtggggaaaggacactctttttaacaaatggtgctgggataattggctaagcacatataggagaatgaaactggatcctcatctctcaccttatacaaaaatcaactcaagatggactaagcactttaagatgtgaaactataaaaattctagaagataacattggaaaaacccttctagacattggtttaggcaaggatttcaagaccaagaacccaaaagcaaatgcaataaaaacaaatataaatagctgggacttaaagagcttttgcacagcaaaaggaacaatcagcagagtaaagagacaacccacaaagtgggagaaaatcttcacaatctatacatctgacaaaggaccaatatccaggatctacaataaactcaaatcagtaagaaaaaaacaaacaatcccatccaaaagtgagctaaggacatgaatagacaattctcaaaagaagatggcccggcacagtggctcacacctgtaatcccagcactttgcgaggccaaggaaggcatatcacctgggatcaggaattcgagaccagcctggccaacatggcgaaaccccgtctctactaaaaatacaaaaattagccaggtgtgatggcatgcacctgtaacctcagctactcgggaggctgaggtgcaagaattgcttgaacctgggaggcggaggttgcagtgagccaagaatgtgccactgcactccagcctgggcgacagagcgagactctgtcttaaaaaaaagaaaaaagaaaaaaaaaaaaagaagatacacaaatggccaagaaacatacgaaaaaatgctcaacatcaccaatgatcagggaaatgcaaatcaaaaccacaatgcaatagcaccttaatcctgcaagaatgaccataataaaaaaaattttgaaaagtagatgtttgcatagatgtggtgatcagagaacacttctacaatgctgctggaaatgtaaactagtacaactactatggaaaatagtgtggggattccttaaagaattaaaagtacaaataccatttgatccagcaatcctactactgggtatctagccagaggaaaagaggtcatcacatgaaaaagatacttgcacatgcatgtttgtagcagcacaatttacaactgcaaaatcatggaatcaacccaaatgcccatcagtcaatgagtggacaaagaaactggtgtatgtatgtgtgtgtgtgtgtatatatatatatatatatatatatatatatatatatatatgatcgaatactacactcagccataagaatgattgaattaacagcattcgcagtgacctggatgagattggtgactattattctaagtgaagtaactcaagaatggaaaaccaaacatcatatgttctcactgatatgtgggagctaagctataaggacacaaaggcataaggatgatacaacggactttgggaacttggggggaagggtggcagagggaggagggataaaagactacaaacagggtgctgtatactgctcgggtgatgggtgcaccaaagtctcacaaaccaccactaaagaacttactcatgtaaccaaataccacctgtaccccaataacctatggaaaaaaatttttttaaatatatactaatattgagaacctaacaatgattcttctaagctcaaaaatcacaaaaactatttaagtcaccactctctgtgcctccagtggtcaaagtaggagccaagagtccatgtgtacctctgtacatggacaaaatctccttaattcctcattctgtcttaaaccacaatttcccagagttccctgcttcgtgagatgctccaagggaaagattctgcagacaaatatgtttggtgaggtctatttcataagcagataaagattctgagaaatcccgcagtaaagaacagggttttgtttaatcctatatttcccatacttatttggccacatataaagcctattcatactcagcagatgaacttttaggggacagtgtttaatgcaattctattctgtattcaatgagcagaatactcagcaaaatatttctccttacacagcagcatggtcatatttatccaggggaaaaggcactggaacccttggcctcaaaatgtctatcactttcacaaataaatgtctttgtttaccatcattaaaaaatgattcagtagcattcatcatagatagatagataaatagataaaaatgattcagtagcatttatcatagatagatggatggataggtagcctcttgtatacataggtaggtaggtaggtaggtaggtagatagattgacagatagatagataaatagcctcttgtagtcataccagctggagattacaaaaaccaagaaggtaatttttctataaaacccagccctcaggctggatgtggtggttcacgcctgtaatcccagcactttgggaggctgaggcaggagaatcccttgaccccacgagtttgagaccaacctgaacatggcgagaccccatctctacaaaaaataaaagtaaaaaattaaattaaatttaattaaattaaaaagcgggtatagtggcatatctctgtggtcccagctactagggaggcaggaggatcgcttgggcccaacagctgaaggctgcagtgagccatgatcgcaccactgtactcctgccaagcaacatagtgagaccttgtctcaaaaaacaaacaaacaacaaaaaaaaaacccttcctttttcttcaccacaatttataaaaataaaagtaagtacaccagcgcttctattaccaatcctggaaaagagatctttatctcagcactgctgaggaaaaaaggttaaagtatggcttatcaacatttttcatagctttggcaaccataaaatgatttttcctgactccaggaacacgagggtgagagagagtgtgtgcacaaaagagccagcatgaaagagcgagcctaagacagtcacaagccaccaaacagagtggactgatggctcaggaggcctgttctcatcaccttctggtgagacctccgagtattaggacaatggataaggctggaaagaaatatgcttgctattctcacatcagttagaatggcgatcattaaaagtcaggaaacaaagatgctggagaggacgtggagaaataggaacacttttacactgttggtgggattgtaaattagttcaaccatcgtggagaaagtgtggtgattcctcaaggatctagaccagaaataccatttgacccagcaatcccattactgggtatagacccaaaggattataaatcattttactataaagacacatgcacacgtatgtttattgcagcactgttcacaatagcaaagacttggaaccaacccaaatgtccatcaatgacagactggattaaaaaaatgtggcacatatacaccatggaatactatgcagccataaaaaaggatgagttcatgtcctttgcagggacatggatgaagctggaaaccatcactctcagcaaactatcacaaggacagaaaaccaaacaccgcatgttctcactcataggtgggaattgaacaatgagatcacttggacacggggcggggaacatcacacactggggcctgtcaggaggtggggggctgggggagggataatattaaaagaaatacctaatgtaaatgatgagttgatgggtgcagcaaaccaccatggcacatgtatacctatgtatcaaacctgcacattgtgcacatgtaccctagaacttaaagtataataagaaaaaaaagaaagaaatagtatgcaaatggtacctaacttacttcaaaagaaaagctgtggctttgaagaacgtgttcaatgtttctttaacggggctttatacatggcatcactcaacttggagcagaattcattattaaacttatctgggcttgatgaggacttgagagctgagaaagtactgaagcagcttgcttctaagggaaacatttctctgcttcctgctgtgggtatgtggagactggcatcttcccttctctctcttttctaagcctaaattccaaagcaaataaccaaattgagacatacaccatgcctggataagattgtcactgctgcatgaagaattaccacaagtccagaggcctcaaacaacactcctttttcaccaccgtttccatggggccagagtccagggatcggtgcagctaggtcctctgctcagagtcccacaggctgaaatgaagacagtggctggggctttgatctcctctgaggctcagggtcctcttccaagcatattggctgttgtaagaattacgtttcttgcaactaagaaggattcaggtccctattttcttgctggcttcaggctggtgacctctctctgttcctagaggctgcccttgggttttgggggttttttgctaattttttttttctgagatgaagtcttgctctgttgcccaggctggagtacagtggcccgaccttggctcactgtaacctctgcctcccgagttcatgcaattctcctgtctcagcttcccaagtagctgggactacaggcacacgccaccacacctggctaagttttgtatttttagtagagacggggtttcatcacattggtgaggccggtctcgaactcctgccctcaggtggtccacccgcctcagcctcccaaagtgctgggattacaggcgtgagccatcgggcccggccagcccttaggttcctgacaagtgtctgcctctacggggagtcagctccataaagagctggctatatgactataagccacacagctgttagcttctgcaagaccagcaggagacttctctctcacttcaagtctctctgacctcaaggaaggcccactctctcttttaagggctcacctcactatgccaggcccacccaggataatctccctttccatggagtcaagtcaagagactgataacctgatcagtaacttaatgggacttaattcccatcacagggaggggcttctagggcacacacaccatggggtataattctttttttcctttctttttttttttttttttttgagatggagtctcactctgtcccccaggctggagtgcagtggtgcgatcccagctccctgcaagctccgcctcccgggttcacgccattctccttcctcagcctccagagtagctgggactacaggcgcccgccaccacgcccggctaattttttgtatttttagtagagacggggtttcaccgtgttagccaggatggtcttgatctcctgacctcgtgatccgcccacctcagcctcccaaagtgctgggattacaggcgtgagccaccgcgcccggccactgtggggtataattcttaagggccatctcagatctccacctaccaccacatatctgtttagaaaaaactctctccctgacatttctagcacgttgacatttctagggtctaaatgtacccttaggaaactaattctggagccatgtgttatgaataagatgtagcgctccaccaatttttttatggcacaaacttacaatcaaagctccaaactcataggaggaatcccatttcttctgatacatcaataaatgacaacaagtcattatatagttgaggttctgcctggcaaaggcttcagctcagccatccagggaagatatctgtgttggcctcaggggcaaaagcagcattaggcacaggagacgcaatgtccagtagcccacctttagggacccatgaacagttttaatttcttctcaaatcagaagaaaaaataacaactacatgataatgaatccagcctagattatattcatccttataccaacacagctgcaaaatataagttttagtctttttttgtggagaaaggagcccagaaaggcaaaagctgctaggacccccaaaagtacaaaggtggctctgctagtggcgccccccgaggtacacacgagttttcctcgtacgatgcaagtgccatggctattccaaagggcacctgagccagtctcagaaagagactttagtcaagactctgatcctccagtgctgacctttgggctaagcaacaaatgaagatagttcccagaccactgcaggacagaattaatatgctaatttgcttaatgagaacaaattaacctaaagttacaaacacagggctaatgaagccacatgtggtccctggatgagctgcgtagttttgtttggatccatggttaccttggcctcccggtccgcatcagccacctaacagctgtaagctgatggcctccagggagatgtaagggtataaatgaaacaattaaaatcctcctcaaatgccagaaaacaggcataaaactattatcagcaatatcaataggattatcatcctgtttaaaaacaaaggaagaaggaaaaagaagaaattgaagtaaaagactgtaaattgggaatgggcgtgacactcaatgttctgaggtaagtgctagtgtgagatacttggccattagtatgaaaccaggtagagtatgccaacaactgtaaactagttcaaccattgtggaagacagtgtggcaattactcagggatctagaactagaaataccatttgacccagccatcccattactgggtatatacccaaaggactataaatcatgctgctataaagacacatgcacacgtatgtttattgcggcactatgcacaatagcaacgacttggaaccaacccaaatgtccatcaatgatagactggattaagaaaatgtggcacatatacaccatggaatactacgcagccataaaaaaggatgagttcatgtcctttgtacggacacggatgaagctggaaaccatcattctcagcaaactatcacaaggacaaaaaaccaaacactgcatgttctcactcataggtgcgaattgaacaatgagaacacttggacacaggaaggggaacatcaccggggcctgttgtgaggtgggggaaggggggagggaaagcattaggagatatacctaatgttaagtgacgagttaatgggtgcagcacaccaacatggcacatgtatacatatgtaacaaacctgcaccttgtgcacatgtaccctagaacttaaagtataatttaaaaaaaaagaaactggaataaaacatctctaaaggttgaaaaaaaaagctggaggaaatatgggactagaaaaatgctgagatggataaaagtatggacgatccctggtttctggcgtttcaagcttttttgactttacaacggtgcaaaagtgatatgcattcaatagaaactgcactttgaatacctatacaaccgttcggtttctcaatttcagtacaatattctgtaagtttcatgaggtattcaacaccttattataaactaggctttgtgttagatgattttgcccaactgcaggctaatgtaggtgttttgagcacgtttaaggtagctgggctaagctatgatgctcagcaggttcggtgtattaaatgcatttttgacttacagtattttcagctatgataggtttattgagatgtaatcccactgtaagtcaaggagtatctccaaaaggaaggaggtgaggcttaatgtgtggaaaagataccaggatggaagaccagaaaatcatgcagggagatacaaggtgccacaccatgccaacagctgagaaatctgaacagagaggaagttctgctgttagatacctgaccttgtcacttcaactcttgttcataaaactagggaattcagactgaatagtccctgaagcctgctctataccaaaccatccacaaacctacaaatttctagaaaaaaagacaccaactcccattccatggaagagaaaatggctccaacccctccccataagtttccaagccacttgtagaagtcgtagcacaccttgaggaaaagagcccttggctgcaaggcaggtcttcattctgctgaaccagggtgacaggcccagctgagggcaacgcagccactgaaaacccacagggcatccaagggaggcgcaggctggcacccctgctggcctgggtggtgctgcctttctcagtcagaggttccctgtgggaacatcacatccagtgggttccagagaggaagaactctcagcaaaggtgaaggtttaaactgagaaaattgtgacctccacgcaagccggcccaggctctttcgggtgtgggcattcctcctacaaagattatctgttgagaattactaccgccccccacagagggaggcttagcacatatactcaggtgaaagatgggaatgttctggaagtgatagtagtttcagaaattaacagatcttctagggcaggggtccccaatccccaggtcacaaaccgggccgcacatcaggaggtgagcagcagggggttgaggaaaggaagcttcatctgtttttttttgttattgttgttgttcttttttttgagacggaggctcgctctgtcgcccaggctggagtgcagtggcgcgatctctgctcactgcaagctccacctcccgggttcacgccattctccttcctcagcctcccgagtagctgggactacaggcgcccgccaccacgcccagctaattttttgtatttttagtagagagggggtttccccatgttagccaggatggtcttgatctcctgacctcgtgatccgcccgcctcagcctcccaaagtgctgggattacaggcgtcagccaccacgcccggccgcttcatctgtatttacagccactccccactgctggaattactgcctgagctccacctcctgtcagatcagcagcggcattagattctcaaaggagcatgagccctattgtgaactgtgcatgcaaaggatctaggttgcgcgttccttatgagaatctaatgcctgatgatctgtcaccgcctcccatcacccctagatgggaccacctcgttgcaggaaaatgagctcagggctcccactgattgtccattatggtgagttatataatcatttcattatagattacaatgtaacaataatagaaataaagtgcacgataagtgtaatatgcttgaatcatcccacaaccatccatcccccgctctgtagaaaaattgtcttccatgaaactggtccctggtgccaaaaaggctagggactactatgctagagtgagatattatacctttttattataagaaaacaccctcatgagaagaaaatgctatataagcatgctcagagagagagagagagagagagagagagagtgtgtgtgtgtgtgtgttttccttttatctagaagaccagctcctaagcatatcctgggagccatcctaaaaccagcctccacaccagagtgcccgcccaggaagcaggcaaaagagggtggtatgtccacaggtccctggagggttgggctaacttaagctaggaaaatcaaaagcatcccttcccaagcaggaaaaataatccgtgacgaaaagctccaacagccagaggagagagtgctttgcaaaaaacacaaacccatcagaggcaaaaggtactgattgcttttctctgacatgtatcttcagctggagcaatgcacaaagcattcgcactgtgcaccttcagagtggatgctccaggccagcaaatcagcctcagattaatgttgagagccgctggagagctcatcactgccaggacatgagggatcaactagggaggttaataactgtgcccagccccttaacagcagagctaaggagggcgctttcctctctgcagtctcagttcttttccaccctcggttgttacaattgtctacacgtggagaactaatagcattcaccaccccctctcctccaccccagaccccagcctccttcttctccacctcctgacagcatcagcccccatccaacctgtaacatcatcctgcatcccggcctgggagcaacaaggagaaaagattgtgttcccttgtgggcctggaaagcaatgtttgtttttggttttaggagctgatgcatgtccagaaaattagctgttgccccagaaaccccatgagctaagcgggaaagcaggaagggaagacatcagttctagaatttaaaaggaaggcatctgcgaggtaactatggagagcctgagactcagtccagagaacagagaagagtttgcccaggttccaccagagccgagaccaactcacagcaaagtagctgcatgacgatctctctctctctcttttttctttttttctccattcctaagaccaggacaattgtgtggaggaaacccattgggaatctgaagggctacaggtcatgcataaggtcacacagaaggaagtgactaatggtctttcagtttccccaacccagtcagaccactgtccctctgcttctgcccaaggtgggaactagcctgatgtgcaggtggtggactaagcagcaagggacagagtgaccacagaggcctcgctcttcacacacacctgtgcatttgggcagaatcctccccgaccgcccatcagcacctacaggctacagaactctacacaaaggacagaggaaaaaagcgtggtgttgactcctgtgtaagaaaaatgcagccaccacagaattcacaaagagcaagacacgatccttctcggccaaggaaggttctacacacgtgcggacgacacaatccctgggcctcccagagttaactgaaaggaaagaattattttttattcttttttttcttttggctaatttcccaagccaatgtcattgtgccctgcgcctacaccgtcccctgcttgagtaggagatcagagtccagggtcctctggctcacccatctctgatgcacgtgctcaggtctaccatgggaagccaatgccatcaaaggacaggccacgatgtcccgtgttctggaggcacggggctctcggaggcttttcccatgtctgggacacattccctcaacttaaggagtcacactgccctcagggaacatattgcaggaaggttacagggtttgacattttcactggagcttaaacatgatggcccaggcctagggtaaggatgggaaaaccagctggttccaaggagaccaaaatgaagccagcttcattggcagcagctagacaccgagcgcccaccagaggactttccagggagggctgtaatgtgcggagggagaacagggtcttacagaagaggacagccagattcaggggagagaggagagagggaaaaagggggtgggaccaacagaagagggacaggatccatttcaattctccactaaaacaagcccctggggacaaaaaccaaggcatctccggagttcaaaaccacttctgtgtcatgccttatggacaccaaccaggaaccttgagatgccaacaatatggcattcacgttccttcttgttccctcctctctcgcatcctcttccccctactcccttccccttctccccttttccccatctttctctctctctctctcactcacacacctctaatatttcctctacattatgtatataaattttcaaaacctatgtatataaatacacagcagacaatccagaaggaaacacacccaactcatctccctggttactagggaaacggatggcaacactaaaatagatgggtggcagagagcttgttggttttctctttaatatttaaaaaaaattatgacacaggccacagtgtggaaggttcatcccagaatataatggcctctaaaatattctgcccaagcctggcaggccagcccctggaacagagattcctcctcctaaaatgaaatcttcctgcagtgaggctggtccggggaccgaagcccagggaaagagacaccaacggcagtcccagcaccacctccacatacctgagcgagatgcttcccagcatccccagagcacttatcttttgttccaaaaaaatgttaatagtccccaaaccatttagactttcatctttcaaccgttaaaaggtcagtctttccaaaataagtctggagaaaaatcatcaataagcaggtcacggtcatttggtggagttagagaaaagatatcagcagaatctgtacacactctctgcctccctccagaaacaaattcattttttgctctgaactaggaaccagcttcctagcttagaactttctgcttctcatggtcacaacttttcacaccttcacgtttgcaatactatttatgtgagccgggaagcaagagcttattacaagtaacaagccctcagatgcagcaacgctctgcaaccagccacatcacaccaacacgggtttcccttttatgtctgaaacaaagggaattctgagcaaatgtgctgctgaattgccagagaggcagggaagcaaagctgctagtaagagaaaacatataataagccccatcagcttaaagctacacacacaaaaaaaaccaagcttttgacatcttgctgggggcaaactcactgatgagaattaagtcagctgtaatgcaccgggaattgcccagaagactgtcattttatgcttatttaaaaagtggctggaggactggctaagaaaatggcaatccaggagtgcctgggtcaaagggccagtggatcctggggtcaccttgggtttctaacagccccccaaggggatgagaggaagcctccccaccaaaagaaaagtggagaaacagtggaaaacttatttctccttagacagctccttcgagctggccgcatgggcactgtgtcctcagagcctggctcatgggctccctgccttgtcttccccttgcacggcacctccgctgggtgtctggggctctgggtgtccccaccactcctccagtgcccacaaacaggctgatcgcagcagcaccttccttatgcggccggatgttacatcggagaggctgactgtcctgcctctgaatcacccagacctcttgtttctccaattccctgctttctgatcagtctctgctgaccatacgagtgacccagaaggaagacgataaaatgcaaataaccactcatttactatgaccatctctgatgatagatttgggaacggttgagaacttgaactaaaatgagatttctggtagccggttacctctaaatctgcttacagaaataatcatggtttgtatgcaccactgctcaccccctccacacacacatacacacacacacacacacactctctctctctctctctctctgaaaaaccagtttacttctcaggtggcaagaaagcagctctgggcccactgctcaacttcccctcccacaggaaatggcacagcgccccccgattttaatgaaaatctcagccctttatttccaaaaccctctggactgggaatgcattttctcccacttcccatccagatggaaagcaaacataaaatccacaggagagagtctgccatcagcacttgtgatcaacagcatttcgaggaagcttgactccccgtgagcagagcaccaacgtgaaggcgggtctcagcagctcctggctgtcccagctggggccgggccgccccccaggaggactaccaaactgtatcccttgttactagcatatgcaaccgggatgccacccccacagtctacctacacaagtgggcttacaacaccaaaactggtttgtagtgtgtttaaaaaggagaagactcaggggctgggtgggaggggcgcaggattccaaatgagccatctggggagacaggttttatctacaaagcacctacggtttgcagactcaagttctgcttacaacctgttgggacccgagcttctctctagaaggagaatacagtgtgtgtgaagtttccaggacacctggcatgtaataagccctcaattaatatgaactgtgatcatcaccagaatcattattaaaccaaatactattctggaactaccttagcagtggaaggaacagagaaggagaaagaaaaacggtctcaacgttgctgtaacaaaatcacagccactcaaatctaaataagtgaataaaagcatatcccacagaatagaaaaggacacgttatagttattggtgttaccgctttctcccttccccatgggtgacagccatcacggcccatcatgtccagagagccaaggatgcaaatcagtgggtgggaagtgagatgaagtgttcacagcccagccaggtaagggcattgcaatacacatcaccgccccacccttccatttcatagatgtgttctgtggtctcccgatccaatcgtaaacctaatatttactcagtgaaagcagtatttgtgtgcgttgccatctaaaatccaataagtatggagacagaaaagaggctgtctgcttatgaggcatgagggcaaacacagcgagctctttaaagagccattgagctaatcaatatcctctcccatttccattcaggggccctgagccaacggagacttaataattattttccatcattacaaccctccgagaagcttacaaagaaaaggtcactgtttctaagtttgttcttctctatttgccaaacacagattatttcctggggtccatgaggatctcttcccagactgtagcaaccaaagacagccctcactaggcctcttggagccggctttagaaacaggatattgctctgcccgtggaaatcactgtggtcatcacatttagttgtctggcctcctgtcctgaccttccctgccaaggtcaagttttggccaaccctcctgttggatattctttttaatttgtccaggtctcaaaaataaacaccaacctctgtggtaggtcaggcaggaaggaaaaggatgctgtgggttgctggacaccatgaccagctccttcaaccgagctcctggacagcgaccacacaggcttcagctgagccctttgtgcccacatgcacaccacgaagcccaccataaataccccaagctgccttctgcttgtcctttccttaggaaacgtgaacaaacaataacatagaaaaattatggaaaccatcttttccttgcataaaagttggctcaaacaactagttaagattaggtttgattagaagaaatagaaaaccctactgcagcgacttacacaggaaaggtttatttgtctgggtcagcagaaggaccagggtcagccatccagcgggtacagtggccccagcactgccgggggggcaccaggctactctgtcacctgagtgatggctgtcgcaccccaaggaccaccctgctgtttccaggagaaggaagggcaagtagaagatgagaagggacaacctccctgatgacttttgctgacctcacatggtttccctgggctgcaggggaggctgtaggtctaggaattataggtaggcacattgctagatcaaacagaattggagttctgttagaaagacaaaaggataagtggatttttttcttttttgagacagggtctcactctgtcaccctggcaggagtgcagtggcacaatcacagctcactgcagcctcgacctctggggctcagatgatcctcccacttcagcttcccaagtagctgggatcacaggcatgtgccaccatgcccagctaattttttaaaattttttgtagagatggagtttcaccatgttgcctaagctggtcttgaactcctgggctcaagcgatccacgtacctcggactcccaaagtgctgagattaaggcatgaaccaccgcacctggccagtaagtgattcagtaggtaccatggtctgaaagtttgtgtcctcccaaaattaatacagtggattcctaagctccgaggtgacagtccagtcttgtgtgcatgatgacatgaaagtcaacagtgggtgacatataagacagtgattccacaggatcataacagagtgaaagattcctattgcctagtgacatctggatgatcctgaccctttgtaggcctaggctaacattcgtgcttattttattttttattttcttgagatggagtctcactctgtcacccaggctggagtgcagtggcgcgatctggctcaccgcaacctctacctcccaggttcaactgattctcatgcctcagcctcctgagtacctgggattacaggcgcccgccaccacacttggctaatttttgtaattttagtagagacaaggttttgccacgttggccaggctggtctctaagtcttgacctcaggtgatccacccaccttggcctcccaaagtgctgggattacaggtgtgagccaccacacccggcctaatgtttgcatttgtatcttcattttgtaccaaaaaaaaaaaaaaaaaattaagtaaaaaggaatttaaattttttaatagaaaaaagcttacagaacaaagatatcaaacaagaaaatacctttgtacagctacagctttacagtgtgttttaagctaagtgttattacaaaagagtcaaaacgtttttacaagctgataaggtaaaaatgttacagtaagttaaggccaatgtattattgtagaaaaatattttgattgctttagtgtagcttaagtatacagtgtttacaaagtctacggtagtgtatagtaatgtcctaggccttcacattcactcaccactcactcactgactcactgactcacccagagcaacttccagccctgcaagctccattcatgatgagtgccctagacaggtgtactacctcttatcttttataccatgtttttactgcacctcttctatgttcagatacacaaatacttgtcattgtgttacagttgtccacagcattcaacacagtaacatactatacaggtttgtagcctcggagcaataggctacaccctacagcctatgtgtgcagtaggctatcccatctttgtttgggtaagtacactctatgatgtttgaacaatgagacatttctcagcatgtatccccaccgttgagtaatgcatgactttattagaaggtagggcctttgggagatgattaggtccagggttagtgcccttataaagaggtcctagaccaggcggtggctcacacctggaatcctcacaatttgggaggccaaggcacatggatcacctaaggtcaggagtttgagaccagcctgaccaacatggtgaaaccctgtccctactaaatacaaaaaaattagccaggtgtggtggtgcatgcctataatcccagccactttggaggctgagccagaagaatcacttgaaccctggaggcagaggttgcagtgagccgagattgtgccattgcactccagcctgggcaacaaaagtgaaaacttcatctcaaaaaataaaataaattaaataaattttaaaaataaagaggtcttagagagctgcctcaccccttccgccatgtaaggacacagtgagaaggtgccctctatgaaccagaaagtgagcttttcacagacacaaatctgctgctgccttgaccttggacttcccagcctccagacctgtgagaaataaatgtctgttgtctataagctacccactttatactattttgttatagcagcccaaatggactaagacagtagggtatcagttcagctgctgtaacaaagatagaaagcgaacaatgactgaagtacaatagaccattatttcttagccagtattatttcttaggtaaaagtcctggtagtaaggctacagcaggtatggtgtatagagcaggtatcaagaaggactgaggctttgagaaaacaagaatgaaaatggcagataggccaggcgtggtggctcacacctgtaattccagcactttgggaggctgaggcgggtggatcacgaggtcaggagattgagactatcctggctgaaatggtgaaaccccgtctctactaaaaatacaaaaaattagccgggcgtggtggcgggcacctgtagtcccagctactcgggaggctgaggcaggagaatcacttgaacctgggaggaggaggttgcagtgagccgagatcatgccactgcactccagcctgagcgacagagcgcgactccatctcaaaaaaaaaaaaaaaaaaaaaaaggcaaataatgtcttagcattcttatgaaaattaatatttgaatttttaaattattattattattttaacctctcagctcccttgaaaggatcttgaggaaactctaggcagtcccccaaacacactttgagaactaccactttaagatcacacctctttaataaatgaacaaaaggataaagacatggcaaacaacaactcagtccctaggtctcacactcaccctccattccaattttccacttaaaaagaaaaagagtgataactgaaatgttagagaaagtatgaatcatcaatgggcaacaaccactgctgggaaaatgacaccgagggggaaaatcctcatttgcagaaaggcacagaaatgtctctgttggccgggcgcggtggctcacgcctgtaatcccaacactttgggaggccaaggcaggcggatcacgaggtcaggagatcgagaccatccaggccaacatggtgaaaccccaatctctactaaaaatacaaaaattagcctggcatggtggcacgtgcctataatcccagctcctcgggaggctgaggcaggagaatcacttgaacccgggaggcagaggttggagtgagctgagatcgtgccattgcactccagcctggcaacagagcaagactccgtctcaaaaaaaaaaagaaaaaagaaaaaaagaaatgtctctgttaggtctcaggattatatattgtaaccaatgttacaaagggacaggagtggtgggaatttctaacatggtgcccccaaagatgttttgcccttatccccaggacctatgactatgacacgccatcagtaccatgctgtggtgtgttgtgagtcacagcttgcgttaggataagattacccggttgggcctgacctagtcccaggagccctgaaaagcagaaagctgtgtccagtgaaggcagaaagggaagtcagagagattcgaaagtgagaaagtgcctgagccatgactggctgaagaagcagggagccacatgggaaggaatgtggacggccccaaggagtggagagaggccctggctaatagccagaaaggacatggggcctcactcccgcagccctgctgtatcctgccagcagacaggagcttggaagggactccgaaatccagatgagaacacgaccggctgacccacccacgtgctcccaaccctctgacctatggagttttgagctaacaaagggtgctgtttaaagctgttagacttataatcatttgtacacagcaagagaaaactaaaataccagggcaggaaaaggagcgtgtccccaggccctagttcatgcagataaaacctgtcttggatatcagaggcaaggggagaacacccccacccctggtgagatacaccagggacaagtttagatgaaccacctgaaaaagcatcagagaaagtgaaagagcaaagagcagagagagggactagggacatgtgggaaagaaccatgaagtgctagcaccttccataaaacacacaaacaaagggctggaacagaaacacccccacacagcaacaatgagtttggggaaacggtagtgatattatccaaagggtaacggctcccaaagtgaatgaatgcttcctattcaataaagcagtaaagtaccgaggtggcctggagagcacggccagccaccagctgcctgggagagcgaaggtgcccaggagaccgactgcatcggcacctgttcccaggagcctctcccacccacaaagccacaggaatagcaaccagcagtgagtcaccgggtcaccagagaaaaaccagcaaaatgtcagtctccgagcaagcttctctatcattggattcctagccagggtggtcgttgagaatcttccaggccgtcctccagcctgcgaacgcaggggaagtacggggaggttctagtgagaatctgggctgtcgtctgggccccatttgtaaaccccaaaccacagccctcttccctgcccttaggcgttccctgccttcctcttcctcttccttccttccttcctctttcccttctttcctcccttgctccctccctcccttcatcagatatttaccgagcattgttccctgtgagtcactgtgctggtgttggcgacacggccaagaacaagcctaacaaagtccctgtcctcaaggagcctacattgtggtggggaaaccgatgataaagaagtaaaaaatatacaaacgaacaaactggataaggaaggttgctgacaagttctaggaaggaaataaacagagaaagccacgcacattgtggggggtcagggaggagcttgggaggagacatttgcactgaggcagccacgcacagagcttcgggaactctgtttcagagaaaaggaatagcagatgcaaaggccgggaggtgggacagggcttggggagcttctaagaagggggtggggagactgtggggagcatggaagtggaggtgagggagtaagggggaccagtcaggaggccaggttctgggacagagacagtaatgccttaggctggggtggaaaggagtggacaggatgggtccacaagacctttttggaaaggtgccaacagcacttgttcatgagaacgaaaggaaacaacaaatcatctctgttatcattgaacacttagggcacgccaactctggtaaggccctgccttcagccctgggatacaaagaaggatgaggtctgggtcttgctttcaatgaggtgactgactagccagaaacataattttacaaagataaaaaagaaggcccttgctctggggctgacatggttaggttttgtgtctccacccaaatctcatcttgaattgtaaaccccataatcaccacgtgtcaagggagagaccacgcggaggcaactgaatcatgggggcagtttcccccatgctgttctcgtgatagtgagtgagttctcacgagatctgatggttttataaggggctcctcccccttcgcttgccacttctccttcctgccgccttgtgaagaagctactttttccccttcaccttccgccattattgtaactttcctgagggctccccagccacgcagaactgtgagtcaattaaacctccttcctttataaattacccagtcttgggcagttctttataatggtctgaaaacagactaatacaggggctatgtaagtgagacagataattctcactccagttatgctgagaggaacctggactccgagagcacatctgatccatggaaatactgtctgtcttcacctgtcttgagaagcagagcaggcaatgggatgagggacggatagagacattcccaaacattactggtgaaagtgtaaatcagtacaagctcaggagagggcaacttgagaatttctagaaaagggaaaatttgggtcctgatgtgtgaagcgccacagaaaatcgagccagttcaggcccctgccttgtccctacccagctgagctgcaaggaggctgctctgcagagctcacactaacccacctccctccaacacaggaccccaaaacaaatcttgcctataacaggtagcatgctggaaaaccaagacctcagatgatgcagctggcagagtctcaaacctatgctactgcccaaggtagatggaggcaaagcagcatgccctcctcccataacctgctccccaaagcggcaagcacccctcccatgacttgctccccaaagcagcacacccacttcccatgacctccccaaaatggtgcatccttctcccacgacttgctgctggatccactgattcctacaccagctctccagctgggacagccacccttcctgtccccagccaccctgctctgttaagaccatgacatcctatttgcatctataactcccaccaacaatagcgggacccaggtgcttatttatgaagatattactgtacatgtacaaatctcaaagaatcatctaaagaacgattattaacaaaaaaaggtattttgtttggtggctcaagacaaaattagtggtggctcaagacaaaatcaatagcttttctatgcaaaaacaacggccagatggaatatgtcatgaaataggagaccccgtctgtaatactcataaaaggaaatgaaatacccaggaatacattcaaccctaaacatgaaaagtccttatgaagaaaacttaaaatgctactgggagacgcgatgagtagcctggatagatggagtggtgagctttgttcttaggcagaaacgctcatcgtcataaacctgtcatttctgcctacgttaatgtagaaatttgaaacaaagcttgtaaaaaaaaatacctagacgatgttcttgaaattcgcaagctgatgctaaagttcacatgggaaaatatgctgtaagaataaccaagaaacttttgaaaaggaacgtaatacaagtaatacagaagacgaatagatgataagacgtgaagttgcagcaactgaaacagaatagtacctgaagaggcagagctgaaaagattaaagcggcaccatataataaaaatagaatgtgaggctgggcacggtggctcatgcctgtaatcccgacactttgggaggctgaggcgggtggatcaaagaggtcaggagtttgagaccagcctggccaagatggtgaaaccccgtctctactaaaaatacaaaaattagccaggcatgatggtgggtgcctataatcccagccactatggaggctgaggcagagaattacttgaacctagaaggcagaggttatagtgagctgagatcatgccactgcattccagcctgggtgacagagggagactccatctcaaaaaaaaaaaaaaaatagaatgtgagctacaaatataacattaaattttctggtaggcacaatcaccaaggggaaggaaacaggtgaaattaattgtaataacatattttattttatccaaatatatccaaaatagtttcacttcaataaggtaagcaatataaaaattggtaatgagatattttatacatatatatttttagtaagtcttcaaaatccactgtgtattttttatttatagcccatctcaatctggactagtcacacttcaagcactcaatacacacatatggctggctaaatggctagtttattattcaccttaggactacaaaaatccagaagcaaatacgtaaatacatcttctgatttagtaaattttatagctggcatttacattaacggagaaaagatggattattcaacaaatggtatcaagacttctgagagccatctggaaatacatacattttaatctctatctcactttttataccaaaatagattattttaatccctatctcactttgtataccaaaatagattctggatgaattaaatatttaaatgcaaaaaaaaaaaaaaaggaaaccaagttgtagaaaaaaaataggtatttttaatcctcttggaatgaggaagactttactaagtatgaatcaaaaaagactaagttcaaagaggtacaaattaaataaaaatctacatggttggaagcaccataaacagactcacaagtgaccaactgagaaaagaattataataatattgcagataattttctgaatacacaaggagctccaaaataatgagttaggaaagaccaaccatggaacagaaaagtaagagaaagacacagacacttcacagaaagggaaatacaaacagctttgaaacacgtggaaagatgctaagctgactaataagacaaagctgtaggccggagcagtggcacacatctgtaatcccagccacttgggaggccaaggcaagaggattgcttgaggccaggagtttgagaccagcctgggcagcatggtgagactccatctctaaaatttttttttttttttaaacaaagaagactccatgaaataccattttttacctattcctattaacaaaaaatcaaaaattttactaaaaccctatagggatggggtatggataaagacattctcaaacattgctggtaaaagtataaatcagtataagctcaaggaagggcaacttgagaatttctgtaaaagggaaaattcacaaatatccactgtataatcccactttcagaaacttagttttatagatatgttcacatggactcaaatacagacggtagctactttctatctgatgtggtccaaactggtcattaataggttaattttaaacatggaaaatgggaagaatctccccccaaaagtaattttaatttcaagcaaataaatgtgcattcacttgcaaatcttatgatgtaaatcagaggcctctttcgtccatatcggtcaactgataaaagttctgtttcgtctattttgcaaaaaccttgttcgtaatacttcatttacaatcttcagattttgtttctttaaagtggtggaaagacttaaagacacctggggagaaatctggaaatagaatctccatttttctaattcgttgccaagtcttttttttttttaacagctgtctctactatgccttatttgacagaaatttggtgattcaatgttagcaaatctcttcaaatctgaactttcattaaaattacataacatttgatgaaatcaaatgatggcagcaagtgcagctaaaataaatagttggattaatgaacaactgactcaggttgcactgacgacagggctgcaagtgtttggagtataatgggcagcagaaacacagagtgtctattatccatgcatctccatccaggcaaggtcaactcagagaacgtctattaaatatccaccaggatattcactgcatcactgttcctaagagtaaaggacatgaaacaatcaaaatgcccctcaacagggaactgattagataactcacagtaccttcatttgatggaatagtacccagggtgttttttgttgttgttttttgtttgtttatttgtttttgtttttttttttgagaccaagtctcactctgtagcccaggctggggtgcagtgccgcgatctcagctcactgcagcctccacctcccaggttcaagcgattctcctgtctcagcctcctgaggagctgggattacaggcaagcgccaccacaaccagctaattttgtatttttagtagagacgaggtttcaccatgttggccaggctggtctcaagctcctgacctcaagtgaaccacctgcctcggcctcccgaagtgctgggattacaggtatgagccactgtgcccagcctgttgttgttgttgtttgcttttgtttttaaataaagcaacatatatggatgtgctaagatggaactcctctgtccaagatgtggtgaaatcaggctatggaacagactaatatatctacacttacatgcttagggagacagaaagcacctctggaaaaatacagaaaacaacctggttacaagtggtcacctctgaggaaataaaataagtaaccagaagacagaggtgagagaaagacttttcaccacagatccctttgtaccttttgagtgatgggctgtgggcaattttctctttcaaatcagagccaggctcttcacccagactccataaagatgcccaacggtgagaacgaagtcggaagaaaagaggggttgctgagagctggtgagttactaaggaaaagggaaccctgggatctgccctcaccatctgggcaaggctccaagggaagtggggatctgtgaaatccccagatggatttgggaatctaagagcaggggccctctagacccctttcctgagtgctgttcaggggggtggcaagctccagagaagtgccagcagaggggtaaccaggcagagaggacctgggtagcctcaggtttctcatggctcagagtggggctggaatcgtggagtgattctgggagcctcagagccacattgaaatagagaaacaggaggcaggcccatcgaattgccactatcagcagcaaaaaaacccagctcttgcccctgttcttcccccatgaagcagaacggccttgaaagctgcttgtagcattgcattgcacagagcatgggcagaacaaactcagccaccccaggatgggcacagaagtagccatgagacctgaaggggcttggtcaaacccggcccacagtctgtttttgtaaataaagctttattggaactcagacatttaaaaaaaaaaaaaaagaaagaaaagaaaaagaaaattcaagaaataagattcctttcccttgggtgttgtgggatacatgtaaagcccaggcacactgaatccacaggcttcccaggagttcgagttttattcagcaaagcagctgttctcaaagtggggtccccaaggccagcagcatcagcaacacccaggaacttgttagcaaggcaagttatcaggccccattccaggcctctggtgggcccagcaacccgtgtttccgcaagacctccaggggattctcatgcactctcaaatgtgagaatcaccgcagtgaagcaacgccttttacaggggctgagaaaggtgaagtctcaccgcatctggttaccattcctgtgtgccacaaagtattttatcaggctctgagtcatctgacatttccttctggaagcagaatgttaaatgaataaggaggaaggccatttgtttatctgaaacataacaatatcccaaatctatttcatttacttctaaagctaatgattctgcaatccaataactctagagaattgcacacagcagcaataaccctcttatggaatcaattttctctggttaggaacaaagaattctcccctccaaaaatccaacctgcattgattagttcatcagagcacactaggaggcccagccgggctagaggcagggcaaacacagtaagttgtctggggccacacctccctaggaatgtgcacactccacgtggctgacgccactccacaaggcaccaggtacaaggcaatgatctgctcatgcttaagtggcctgggagggacatacaggggggaaaggacagaaagagctagctgagtgagggccacgcagacagcgcccacagaaggaggaacatgtcacagagtcgctctctgaatttttgcccacaactttgctgacgggactagccagctatatctgaccctatcaggtattacccacttgtgacattcatttccatgcaaaccttctttatttgcatggggcctgcctttttttttttttttttttttttgagacagagtctcactctctcacctaggctggagtgcaggggcgccatctcggctcactgcaacctccacctcccaggttcaagcaattctcctgcctcagcctcccgagtagctgggactacaggcatgcaccacaacaccgagctaattttggtatttttaggagagacagggtttcgccatgttggccaggctggtctcgaactcctgacctcaggtgatccacccacctcaaactcccaaagtgctgggattacaggcatgagccaccgcatctggccaggcctaactttttattactgtcttttatttattaatcttcctgcaatcgatgccctatctccctgtgatgggttgaactgcattcctgcaaaagatgttgtctataaatgtgaccttttttgcaaacagggtctttgtaaatgatcgaggtaagataaggtcattagggcaggtcccaattcaatatgattttttccttataaaaaggagaaatttggacacagagacaggcacacaaggaaaatactacgggaagactggagttatgctactagaagccaaggaaccaccaaaagctaggagaggggcttggagctcatccttccctggagccttgaggaggcacatggccctgctgacatcttgaggtcagaatcttagaactactttccagaaagttctagcctctagaactgagacaataaatgtctgttgtttaagctattcaaattgtgatatattgttcccacagccctaggaaaccagttcactccccagtaagactccagggtcccccagaagcctgacggctgtggagctagctttgaaagccaggacaccctagtcacaacacaaccactagggggagatgttgaggtgatgcaaaccacggctggggagctggacaaactggtggttgccaagcctggccatgcagacaaagccccggtgaagctttttagaaatacagacgtctaagctccacccaaagcctcctaaatcagaacatcagaaagtcgagtgtgacgcgccacctgccaggcactggcccacagaccctccaaggacccttccaactgtgaggtcccattactgccacactgctgcaccctccacccccagctagcccgagggggctccatggatcaggagcatcagccaccttgacagcttgggagacacatacagtcttgggccccaacccagacctgccaaatcatcatctgcattttaacaggctcccggggtgaaccgtgcacacattcaggtgtgagaagcacttgtagattggatataagacataatcacaggccgggcatggtggctcatgcctgtaatccaagcactttgggaggctgaggcaggcagattacttgaggtcaggagttcaagaccagcctcgccaacatgagggatgaactggttactgtcttcaactacaatgactagttttttataccagaagggaaagaataaaagcacagggtattgtccaataaaccacaaagctctgacatagtatggatgtgtgttccctccaaatctcatgttgaaatgtgagccccagtgctggaggagggcctggtaggaggggtttgggtcacgggagcagatccctcatgaatggtttgttgccctccccacagtaatgtgcgagttctcactctgttggttcaggagagcactggttgtttgaaagatcctgctagttcttttgctccttcgcttgtcacgtcacacatctgttcccccttcaccatctgccatgattggaagcttcttgaggccctccccagaagcagatgctggcactatgcttcttatacagtctgcagaactgagagccaaataaacctattgtctgtaaattacccagcctcaggtattcctttatggcaacacttaatggactaagacactccacaaggacctgaagtttgtctcttattaggtaatcaccaaatgtacttgtgtaaagtgtatccagtttgagtgaatggggcacttagcatacagttcctggatttgtgacagaaataagatggaatgaacaattaatcccacaatctactaaagaaatcagtaagaggtaccctgacactcccatggcaaattcagaaatgttaaaatatgctccccattccccaaaaaggggactgaatgggctattaggggaacagatggcttgcactagaattctttagcaatctctggaaaataagaaatgtttttttccttgcctaaagacaaagtcctgaatcagaataccccttcctcttccacaccaagtctttctccactccaaaacttcatgacacttacagagaaaggtgaagccccaacggttgttttgggaacaatctccctcatccactcacccatccaaaaatgacaccacttaaaaaaacaaacagccggtgggggctacttcttcccatgttctcgtcctgaatcgtaaaagagcaaagcctactttccattattactcttggcatgaatggtttaaaaagagcatctataaaccagaaaagagagccacgtaaaagtcagctctcttttttattatttttgtgagtacataggtgtgtatatttatggggtccatgagatgttttgacacagccatgcagtgtgaaataagcacatcatggagaatgcgacatccatcccctcaagcttttaccctttgaattacaaacaatccaattacactctttattttaaagtgtacaattaggctgggcacagtggctcacgcctgtaatcccaacactttggggggccaaggcgggaagatcacctgaggccaggagttcaaaaccagtccggccaacatggtgaaatcccgtctctgctaaaaacacacacacacacaaattggccgggtgcggtggtacatgcctgcaatcccagctactttggaggctgaggcatgagaattgcttgaacctgagaggcagaggctgcagtcagacaagatcacaccactgcactccagtctaggtgacagagcgagaacttgtctcaaacaaaacaaaacaaaacaaaacaaatgtacaattaagttattactgactctagtcaccctactgtgctatcaaatagtaggtcttactcattcttattccacttttttttttactttttcatgttgcaaatctgaaactcggtaccttttaaacaacaactccccttttctcagtgcccctagcccttggcaaccgcagttctactttctgtttctatgaattgtgttacttacttatttatttatttatttatttttatttttgagatggagtctcactctgttgcccagtctggagtgcagcggcatgatctcggatcactgcaacctccgcctcccaggttcaagtgatcctcccacctcagcctactgagtagctgggattacaggcgtgagccaccacgcccagctaatttttgtatttttagtagagacaggtttgctctttttaagattacaatatgcaggcagagcatggtggctcacgcctgtcatccgagcactttgggaagccgaggagggcacatcacttgaggtcaggagttcgagaccagcctggccaccacgataagacctcatcttcatctctactaaaaagatgaggaagttctagaaatctgcttcacaacaatgtgaacgtatttattaacactactgaactgtgcacgtaaaaatggttatgctggtcagttttctactacgtgtctttcaccacaataaaaagaaagataaaaataaaacaacaacaacaaagaaaacaattgtccatccttactcaatgccagaggctgcagtcccacagcacagccagatcttggctgtatttcacagagttctcctgactctagaatcatccttcctttaattgtttgatccttttatttgcaatgaaatgattttaccaagataacagtacaagtttctcttacatttcttggagctactatcatcccttataacataacagcgagggtataaatattccattacgtcaaatcattttgtttatactatcccaggatatgtcttaaagacatagattacctttaaatgatctagtcttgtatctgtttttgccttctaatagaatttttaaagggcatctaccgttccaagaaattatcattgtatttgggaagtatgttcatttataatgacaattctgtcatgcaccctcaccttccatagtttatcaagctggctttgagtgaagactgtttttcttattccactgtttcaagatgtggatttttgcatttgttaagagaaggtgataaactctcatcttgaaaatgaaacagatcattacgtaaagtctccaccagtatttgagccctggtataccactcttccagtgatgggcttcacatacagaaattacgaaacttatttagggacataactgtcacctaggataaaatgactgctctcgttagaggctcttcagtaaatttcttttgtcttcattatttcagtaatttattctttcgatgagacgtcatcctaaactacacagcctaaaaatggataatgctgcacgtagtatcagactatttgcagatgatgctgtaagtgacttacccatcttagtacatgaaaggcataacatcaaaaatattccatctcaaaagcaagcattaggctgcaaaattaattaaacaaaaattggtgacatgcactacccttaggtcctgcttggtcttacagttagaatgctgacattcaaaccgatgcagagccttgatggctgctacaaataaattattccaaccagttacaaaccctaagactgccgggttcagacagcttgatcctagtcactacaaaatgaccaagaaagaagaaaataaatgaataaatacaaaatgaccaagaaggaaaaaacccccaggaagggttcaagtataatagtgtgatatattaaagaaacacatttccttttcctatcaggattttttttctctctctttttcaagatggagtctccctctgttgcccaggctggagtgtagtggcgtgatctcgactcactgaaaccttggcttcccaggttcaagcgattctcctgcctcagccctcagcctcgcgaggagctggagctacaggtgcacgccaccaggtccagctaattttttttgtatttttagtagagacagggtttcaccatgttggccaggctggtctcaaactcctgacctcaagtgattcacctacctcggcctcccaaagtgctgggattacaggcgtgaagaaccgtgcctgtcccatatcaggattttctaataattctccccgaccaacacacacacatctacactaaaatcttacagtgtatatatatataacctagagactaaagtttaggctgcttaagttaatgactgtcaagaccagggaccattactgttatacaaagtacggaagaaatattttggtgactattacatgagacaaagtctgctgatctactgtcaaatacaattcgtttttcctttactttgaggtcatttagtcaatagtttttaagactccttcttaaggcaatctttcagaaatgtagaagagtacagagaataacaagatgtaagtccacgtaccaacgatctagatttaataaaggttaacctgttaccatatttgattcagattttttaagtaaactattacagaaagaattgcagctcttctctctccgcaccaattagaggtactcaatatctgaaaaattccatgggtatgctttataacgctatttttacacttttaataccatgctaatatatttttatatgtctacaaaaaattcacactattattttatacaatttcaaactttagttaaatagtattttactgtatgtagcattcggcaacttttgttatttttatttattttttaatttttttttttttgagatggagccttgctctgtcacccagactggggtgcagtggcgtgatctcggctcaccacaacctccacctcccgggttgaagcaattctcctgcctcagcctctcaaatagctgggattacaggcccacgccaccacacccggctaatttttgtatttttattagagatgggggtttcaccatgttggccaggctggtcttgaactcctgatctcagataatccccccgccttggcctcccaaagtgctgggattacaggtgtgagccactgggcccggccatgcaacttacttttttaaatggctacttagccatgctatcttaatgaatttaccacaatttaattattcattcttctactgactgataatgtattcatttccaatttttcaccattacaagaaatgctgcaatgaacattctcatgcagggttccctgtgtacattcgcaagaatgcctgaagaacatgtatctaaaactgaaactgctttgtcatgggatatgttatatcttcagttttaccagatattaacaaattactcaccaagatggttgtatcaatttgcactcccatcaacagtgcatgagagttcctatttatcaaaaatctcttttgtcaatactgaatattgtcaaaccttttctcattttttttggtcaaatacaaaaggtgagaatttaaatcgcagaggccaggagtggcggctcacacctgtaatcccagcactttgggaggctgaggcagatggatcacctgagttcaggagttccagaccagcctggccaacatagtgaaaccccatctctactaaaaatactaaaattactcgagcttggtggcaggcacttgtaatctcagctttacttgggagactgaggcaggagaattgcttgaacccaggaggtggaggtggcagtgagccgagatcacgccattgcactccagccagggtgacaagagtgaaacttcatctcaaaaaacgaacaaaaaaagaaaaacaaaataatttaaattgcattccctttattaccagtgaaactgggcatcttttcatgtgtttattggttctttagggctccttcctcataaattcctaatcaaatagtttgttcaatttttttactgtgcacggtttgccccttttcattgatttgtggaagacctttatatattctggacaccaatatttcatcagttgtgtgtattgcaaatatcttctcacaagccttggcttgaatttaactctataacgtcttttgtcacagagaagtttgtttttcttaatgttataaattgctttatcactagttggctactcattaaaatcacctggagagcttttaaaaaatactaatgctaaaaaataagttacagcgttagaaagcagatcagtggttacctgggttcagattggcacatgggggatgtattagtctgttctcatgctgctaataaagacacacccgagactgggtaatttataaagaaaaaagaggtttaatggactcacagttccacatggctggggaggcctcacagtcatggcagaaagcgaaaggcacatcttacatgctggcagacaagagagagcttgcacagggaaactcccccttataaaaccatcagatcttgtgagacttattcactatcatgagaacagcacaggaaacacccgcccccatgattcaattacctcccactaggtccctcccaggacatgtgggaattgtgggagccacaattcaagatgagatttgggtgggggacacagccaaaccatatcgggggtgctgactcagaaggggcagcaggcaccagggaatttcctacaagggtaggaaaaaatcttaaatttgattattgtaaagattacacaggtgtacacatttgtcaaaacacactaaactagaaagttaaaatgggagcgttttatgtaaattatacctcaatacagttgatttgaaaaaacagatgcctgggctctaccacgtacaattttagttagaatctgtaggagttgaaacccacaatctgtatttgttttaagtgtccacagatgattaaaatgtgcagccagggctgagaaccactgtcctaaatattgttgaagcattgctaacttcgcctgggagcatttttgcaaagggtatatggtagattacaattttggaggcgattccactggatcaacatttattgactaatcaatccttttcccactgaattataatggcaactctgccatgttccatacaccaagtttctatatattcatgagacttgccagtcttccccgttgattctgtacagctatggcacaatgtcacactgttgtaattaccaaaatgttctgctgtttgcaaggtcaaaatcctttctcttcctcctccctctcttactctccttccaaaatttaagattttttcctacccttgaaattccctggtgcctactgccccttccgagtcagcacccccaatatggtttggctgtgtcccccacccaaatctcatcttgaattgtagctcccacaattcccacatgtcctgggagggacctagtgggaggtaattgaatcatgggggcgggtgtttcccgtgctattctcatgatagcacctattcttggtcctgtatttttccatatgaactacatatttagcctcacgagtttcacccaagtttcacccgttacagtcatgaactgccacgcctggcctggtttctacttttcttcataaaaatcctgcagtatttcatttgcttcatatacagtagccaaaacccacaagcaattcaatgtccaccaacaataggatgaataaataaatatattcatatggtggagcattgtataacagtcaaaaggaattaacaagagctatagacaatgatgtggataaattttattcctatatttaatgaaagaagcaaaatacacaactaatatatatagaatgttttcatttatatacaattgaaatactaaatcatgttgtttagggatgtacatataagggttgaaactataaaaaagaggtaattataaaagtcagaatagtggtgacttagcagcaagtagcaacagggattgatcaagaggggaatacatggggagttagggggacttttgtttcttggcatggtggcggttacaaagatatttgctttagaattattcattacgtttgttgtataaagttttttacgtgtatcatatttcataataaagtgaaaaagcgcttttaattagaaatctgagctctggtactccacaaacaggatccagcctactttaagtagaaggttctctctagataggagctgaggatatggcctgacccgcttgatctctgtgcatcatttaactctaaatcatctctttagaaagaacaaacactccatgagactttcaaatcaaatgccctatacggactgggttcttgatgcttttagcttctccatgctttgaatatattatatgttggaggtgaaggagggggttatttgggctaattgaacatattacccgacaaagcatggtgctagtttccacctggatacagaggtgagttaggtaagaccctgccctaaaaagcttgcagtagccagttaggcagccaacagccattcccactagcatctatgtctcttcttcaacctggacagagagttagattatatatgatacagccctgccttcctgtcttgacctcatctctcaacactttcaagctctccatggcaggttgaatgactggccccagttctttagccctccctgcaaccatgcccttgtcatggccttatcatgagcacagtgtgtttccccaccccttgaccttgggcttggccatgtgatttgcctttcatccaaatagatgtgcaagtgactatgaattggccaagagattgtgagcaggtgtactaagcactacatcaggcctgacccataagaaatgaactcatcattttccccaatgccataaccagctccaaggagagggatcaaatccacctaactccctgtgatggttaatttcacatgtcaacttgactggactaagggatgcccagatagctgacaaaatactatttccaggtgtgtctgtgagggtggttccaaaagagattagcatttgaatcagtagactgagtaaggcagatggccctcccagcatgggtgagtatcatccagtccatggagggcctgaatagaacaaaaaggtggaagaaccatgaattcactctctctcggcttgagttgagacatccatctttcctgccctcagaaagtggcactcctggttcctgggctatcaaatttagactgaatgttttaccatgaattccccaagattttccagccttccgacttggatgaattacaccactggctttcctggttctccagctcacagacaacagatctcagcctccataactgtgcaaaccaatttctttaataaatcctccccccgcccaatgaatcctgactaatatactcctcaagccaaaaataatctcccacatccaattggttaccaagtctagctgtttcttctgaacatcttttttttagatctacccctaattgtcttccttaaatgccaccctaatccccacccttctgccttcccgcctagcctattgtagtagctggagtctagtccagcaccctccacactgccctccttcaccccagagccacctttctaaaatgcaaatctgaagatgtcactcccttgccccaaatccctcagtcccaccactgcctacaggataaaatctaaattctttgtataacatgtcacgcccctcctgatacagccctgcctggtgtctcggccccgtctcttaccgcagctgcaccctccgtggccgcttgaacgtttggcctcaggttttacctctatgtgcgtccacgttcttcccatggccttgtcatgggaatagtatgttttcctactttattggttttctagggctgccggaactaatcaccacaaactgggtggcttcaatgacataaatttatcctctaagagttctggaggccaaacgtctgaatcaaggtatcagcagggccattttctctccaaaggctttaaggaagaatccttcttgcatcttccagctgttggtggttctcagcaaccctcagcactccttggctcgtggcagcgttactcccatcttggcctccatctttgcatggccatctcctttgtgtctttgcttcccttgtctcttctctttttagaaggacatgagtcatattggatttatggcccaccctactctagtacgacctcatcttaactaattacatctgcaaagaccctttttccaagtaaagtcatgttccgaggttccaagaaacatatattttgggagacactattcaacccagtatacccaccctttgatgctggcttctaccatgtgacttgcttagccagtggtatgtggatggaagtatccatgggtcggttctgtgcctaggccttagggagccttgttactgctcttccttttgtgcctctgcccttgtcatgagaaaaacatgccctggtccaaggcagatggcagacacttggggcagagccaccctccccacgaccatctgcagtcttgcagcttaatgtagtcaagagcagctgacccccagctgatccacagatgcatgagaaagctctattatcaatagagttggtccagccaattcacagacaccaagaaaatcaatccttctagttgtataccgctgagattttggggttgtcatgcagcaatagttaacgaatgcatacactttgtgccacagcaacaatgaacgagccggcctgctgcaaggtctctttaacgtacagagtagctccctctttttttgagatggagtctcgctctgtcgcccaggctggaatgcagtggcatgatctcagctcactgcaacctccgcctcccaggttcaagcgattctcctgcctcagcctccagagaagctgggattataggtggccaccaccacgcccggctaattttatatttttaatggagatggggtttcgccatgttggccaggctggtcttgaactcctgacctcaagtgatcctcctgcctcggcctcccaaagtgctgggattacaggcgtgagccaccacgcccagccagagtagccccctcttatccatggttttgctttccacattcccaaactacccagtcaagtgtcaagtgtggtccaaaaatattaaatggaaaattccaaaaataattcataggttttaaattgcacactgttctgagtagcatgatgaaatctcactctgtcctgcgcagaatgtgaattattcctttgtccagagtacccgcattgtctacgctagccatccattagtcacttagtaaccgtcttggttatcagatcaactgtcacgacttcatggtgcttttgtggaagtaactcataatttactcagtaacggccccaagcacaagagtagtgatgctgggaatttgaatatgtcaaagagaagccataaaatgcttcctttagatgaaaaggtaaaagttcttgacttcagaagaaaatcatatgctgaggttgcaaagatctaaacaaatctgttatccatgaaattgtgaagaaggaaaataaattcatgccagttttgctgttgcaccacggggtatgtaactgctaagatgaaaaaggcgttaaatttacgagtggaagacatgaacagaaatgtgttttgattgacggccctcaggttcgatactatccaggatttgaggcatccactggaggtcttggaaagtatcccccatggataaggaccaccatcctccttttaacgaggataggatgtagagccgtgctatgtcacaaggaccactgtactgttcctttgtctgaaatgcatgccccaccatctcctgtcaagcccatctgcctgacaaattccaaattaatctttaagtccaaagtcatgcaccaattttaggaagccttttatgactctcccaagtagactgagtcactgttattcagtgctcccagcctatgctcacctccattatagacagtaattaccactctgtaattgcttgtttatataattacagggcttttgatccctgacacaagcaaaatgtctggcaccaaaagttggcactaaatgaatcacagaaaacaaagacgtgataggaatggggcagtaagtgggaatgaggaaaagggaagaagactggcagcctagaagggaacactgcaaaagtctgaaaaagtctcaagtccagactcacatctctatgtggttttgacacatgcagctgctttggggtacaccttgcagtatgaaactcatccaatcactgaatcacagaactgaactctgggggtccccgctgaaatgactcagtaaagttgcaaggaaagccagacagcagaggagtcccgttctgagaggtggaagggagatggcggcgttttccgcagccacagaggtggggtcagatgagaaaggcagcaattttaaagcagctattaggaagaactctctgactttaatgtggtgagagtgaagcacataccaagagtggtttcagagtctcactgagcagaacaatgaccaggacaaggacgatgacaatgaagatggtgatgattccaagagggcaacaggtctgatgtgacgtaagcacggccctacatcccatcctcaccaaaaggaggatggtggctcatttctcaaggcctagcatctcaaaatacatcccgttagaaaaaagatcataggttcctagcgcaacactaatatctctttctggagatttcaattatccaaattacattctttactttttaactgtctctcattctctcactgccatcctcaaaaatttacatctctccccagccatctctttgtctggaatgcaataatatttgatccttccactctgcaagcctgctggaaaattaattaaaaaccagactgggctcaaagaggccctttcagtccaggaatctcatagggcttagcactctgcagggaaagatccgctccaggctgctaatcattagcctacctgctgcacaccttggagcctaaaccatcaaacagttctcatcaccaagggtttattgagccttatatttggagataatttcatacacgtgttttgagtgctctccaaggagtaatccctagcagtttttagtgcactggggattgcagactcctctgaggagccacggaaggcaacaggtccatttcctgctgtggtgaacactgactgcctagggctgcagatggttttcttttattttagctatcctgtatctgtttttttgtttgtttgtttttttgagatgaagtttcactcttgttgcccaggctggagtgcagtggtgcgatctcagctcactgcaacctctgcctcccaagttcaagcgattctcctgcctcagtctcccgagtagctgggattacaggcacgcgccaccacacctggctaagttttgtatttttagtagagatgggggtttcgccatgttaccctggctggtctcgaactcctgagctcagctcatccacccacctcagcctcccaaagtgctgggattacaggcctgagccaccaccacacctggccggtatcctgtatctgaacccctttctgtgtctagggaattgcccactttatgagacaaggacaaagacctcttcccataacaggagctgccagatgaccgagttctgcctaccagatgcaccgggatagtcagactatctcagaaggcagcaaaatcagctgagggatccatttctcccctcccccattcccctcttcttctccttctccctctcctctcatctctcctttctcccctctctctctgccttctctctctctctctcaatccctctcctctcatctctcttctcccctctctctctgcctcctcctcatcctcctcctcctcctctctctctctctgatgctggctgacacaaaagtggcagcaattgcatccaacttatgttcccgacaaggatatgggaacaaggcacataggcctctggtgctgcatggccagtagcagtctgctcagcagaacagttcagcgacttggttttgggtgttactcttggaagctgagccttgagtgtggttctccttccctcctctcccatcaacattctgggagctacttggtatccttaataagctccattcctgtttcatcagccagggtcagtctctgttgcttgcaacccagaaccctgactgaggaacacactcattttcatatatcatatcacaaggtcagaggccaactgaagttttttaaaatcctacattgactctcagcccaaacataccttcctatagctccaagatattaaggctgaggctttgaaactacatttttgctttgctagttgttctttgttaggctctgcaagtcaaggatattagaagaaaactttagtgcttgaaaagggacacgttcctttctgtctgctgactattgttgtgagctttaccccagaaatgcttcttcactgtggcagccgtaattcattcctatagtatctgctgcatccagtttgaactttttccaatatttgcagaactgtcttcattgtgccctagcctaagacaccatcaccagcctgctggcccctcctcatggacatttgagtttcagctctgaagggcccttctctaagtttctaagttttaataattccaacttctttctctatttcctcatcccgagcagtggtagctgctttctatagttgctacctttgtgataccttagagttctctttttaccctagctaacaattttattccagttagttagccatttgttgtgttaaattctctctgttcaaataactgatatgctttctatctggaactagaacctgactgatagatatcagccttaagaaaaagttgtatacacatggacacaggaaggggaacatcacactctggggactgttgtggggtggggggaggggggagggatagcattaggagatatacctaatgctaaatgacgagttaatgggtgcagcacaccagcatggcacatgtatacatatgtaactaacctgcacattgtgcacatgtaccctaaaacttaaagtataataataataaaaaaaaagaaagaaaaagttgtatgagtatcccatttgcaaccagagaaaacagaaacagagaaataggaaggaagaagagtttccagccaagtcaagatgtaaagtctcagactcagaggccatggaatgagttcaagccatacaagtccagcaagcaaggttatgtgtatacctgggtgatttctgcaatgtgaggaggcaaaagaaagacaagaccagacatactactcagagcccacaggtcccctgcaccaagtcctgcagagaggctgtaccagggcaatggaaagtatcacagacagaacaggtatgggaaaaaataataagttttctgagcatagtgggtgggaagcagggaatagactatcaggcttaggaaagaatggtgaaaacatgcctaaaaccctctgcttgtttgccacaactgaaataacaacagcatcattactaagatgctcttaggatattccaggccttgagctaagcatatctgcacagattgccacagtcatcaattacaaaatgcattctattgtaagacataccattacttgaggtatcactaagaaagaaaaatatgctgtcaattaaacaatgacccgccattgcctgtaagatgcatcccaattgtaaagatagtaaaatatgaaaaaaaatgcttcttacaatcaagggaacatggcagctcatttaatccttataacaattcctatgaagtaggtattggggcttaaaggggcaggggctgagtgactagttcgaagtcctacagtcagcaagtggcagagcatgcatctgatctcagtcggtgggatgccagagcctgcgctactggtaactctggtgcctcttaaaccatttagaagtcagggatcaaactcttacttaacatgtgcaaatgttactgttctattttgagcttttagatgaccaaaaggtattagccatgagcactgagctggtcagacagggtcagagaaagggctctcactaccaaatttccttcaatggcacagagcagagagcaatgccagctcccctgcaaggcaagaggaaaggcacactatggggagaactaaagatgcaaactgtgtgagttccctgcagctgctataacaagttatcacaaatgcaatggcttcaaacaacagaaattcattctctcataattctgaaggccagaaatgcaaaatcagtatcactgtactgaaatcaatgtgtcagcagggccatgctccctctggaggctctagggaagaatctgttccttgcctcctgtcagggcttcctccctccaattcagcctctatggtcatgttgcctcctcctctcctgttcaaatccccctctgcctccctcttataaggaggcttgagattgtatttagggcccaccctggagacaatccagcattacctccccatctccacatccttaacttaatcgcatctgtaaaggtccttctttcatataaggtaacatccacagactccagagattaggacctgagtatctctgatggcccttattcagctgaccacacaaaccaaaggtggaacctgctgctggggcttcccaagcccagacacctaagcaaatatacacaggttgttgaaatttgaaatgttagtttgatatttccatttttcaaaacttacagtggaagagaaactttacctgcaaatatctggaaatgtacagatcaccccagcttgacgggccgggaatcattacaacagaaattgagttgtgtgtgctaatgctgcaaagtactcatatgacaaatgaccttggaccggtctgattggatgttgggggcagagtcctgggtggagactgatggagaactagaaccctcacaaaggcactggtgggcagtagacagaaaagggatgagactagcacctgttttagagaggaggcagacaagaccccaggctaggatgagactggtgcctgtttcagagagcaggcagacaagaccccgggctgaacacggagagggcagagaaagcaatctgagtctacatgagaaaaggggaagggaacttcacagaggtgtgctgttgtgagtcctgggcaggacaatgactgagccaggggtgaggtggccacagagggcagcatcaaccaatgcaagggacaaagaaggcctgagtcaccaagatccgggataatcactatagatttcacaactctcttaccttggctgccactataaaatgccacaggccaggtacggtggctcatgcctataatctcagcactttgggaggctgaagcgggtggatcacccgaggtcaggagtttgagaccagcctggccaacatggtgaaaccccgtctctactaaaaatacagaaattagctgggcatggtggtgcatgcctgtaatcccagctactatggaggctgaggcaggagaatcacttaaacccaggaggcagaggttgcagtaagccaagatcgcaccactgccctccagcctgggcgacagagcaagactgtgtaaagaaagaaaggaagaaagaaagagagagagagagaaagaaagaaaggaaagaaaggaagaaagaaagaaagaaggaaaaaaagaaagaaagaaagaaagaaagaaagaaagaaagaaagaaagaaagaaagaaagaaagaaagaaagaaaagaaagaaagagaaaaagcaagcaagccacagactacagggcttccgcaacatttatttctcatagttctggaggctagaagtccgagatcagggtgccagcatcatcaggttctgacatggccttgctcctcggctcccagagggccgtcttcttgccgtgtcctcacagggtgaagtaagaaagacagcgagctctctggtgtctcttcttaaaaggacactaatcccatatgagggccccatcctcacgacatcatctaaacctaattacctcccaaaggttcccatcatactgagagttggggcttcaacatacgaatgtggaaggtttacaattctggccctggcaataacctaggtatcctgccaggttggcactccactagcaacttgctcagtgggtaaaataagtctcattatttgaagttaaagcgtaagacacctggaggtttctacttcacctggtcaagtcatttgatccttaactgttgctttcaacaatctctctgagaaaaagaggccacaggcaatggggcaaagatggactgtggtcctagggcacgatgttatgggcagagctttctggcccattcccttgggaatattggaaggaaaggggccatcggctcatggaatacccaaacagtccacgagaggcaggaccagcagacactgcaatgtggaccccacgaagatcacagcacataagcacaccgacctaaccccccaacacatatacacatgtcatgttttgtttgtttgtttgtttgtttgttttaaacagagtctcgctccttcccccaggctggaatgcagtggtgtgaactcagctcaactgcaacctccacctcccaggtttaagcgattctcctttctcagcctcccaagtagctgggattacaactaatttttgtattttttggtagagaagaggtttcaccgtattggccaggctagtctcgaactcctgacctcagacgatccgccaacctctgcctcgcaaagtgctaggattacaggcgtgagccaccgtgcccggcccacacacacaacgttttgttaagcctgaacccacaacttgtgcaaataagaaacaggaccaaaaagttatccccaggagcttccacagttcctgatataagggaactgacacgtatcaaatacctactgcatgcctgactgtgtgtctgatactctctgcgtgttattttatttaaccctcatggccaccctctcacaattaatttggaggctgctcaagtgtctctgcggtgcagggtgccagtcaggatgggctgggctctgctgcaacaacaaagcaccttcctgttctatatgcagaggctctgcccgctccagccacctagggacctgctcacagaggctccatctcaacacgtgagtctgtgatcacatcaccacctgagtgacctcagccatggtggctcacgcctgtaatcccaacactttggaaggccaaggcaagcggatcacgaagtcaggagatcaagaccagcttggccaacagggtgaacccacgtctctactaaaaataccaaaaaatattagccaggtgtggtggcgcaggtctgtagtcccagctactcgggagtctaaggcaagggaatcgcttgaacctgggaggtggaggttgcagtgagccgagatcacaccactgcactccagcctgggcaacagagcaagactccgactcaaaaaataaataaaaataaaataataataataaataaaattatcattagcacctacctcacaagacaatgcctatagagagcctggcaccgtgcctgagacaggacacacactccatgactgtgagtcattgtcacgacatgtcccgtacagaaaaaaaagctcagaaaatactcagacagccaatgttccaacacatggataagggtggcgtccatgagatgagattaaaagtgtattttccttacctgttggagtttttattctctacatttctttataaaatgagcatacataattttcatcatcaagaaaaagggcaacatataaataaatacatccaacatgagaacacaaaacaaagttttaaaagaactggccttaatggatcttctagatcagaggtttgtaaactatggattgtgggccaaatccagccagttttgtacagcccacgagctaaggatgtgttttacatttttaaagggtcttggagaagggaaaggaaggggaagggagaagaggatggggaggggagagacagcagcagatgctgtgtgtggctacaaagcctaaaatatttactatctgaccttttacagaaaaagtgtgttcaccctgctttagttcacccgaccacctgattcttcagacaataagtacccaaagccttgggtgctttacttagaattcagtttgtaaacacacacacacacacacacacacacatgcacacacgcacccctacaaaaattatcaggaacacaaagacccttgatataaaatgatgaatatacaattatctgtcatcacactgcagacagtacgtgattgagtctcctttccacccaaccgttcacacatttaggaagcgtttattgcggcgggagttgttaggggagagattaagggggcctcagcatctccatgtcccaggcactgttctaagcctcgaggattcaatgatgaataaagctccaggctgaacactcactctttcctgtagcaaatcagtttcagggcccctccgtgtcaggctctgtgccaggcgctggggatgcagaggcaaacaagaatgatgacgccactgcccaaggagcctacagcccatcagcgacatgggcagctaagcaaccacgcagcacggcgctcagtcaaggggccacagagagattcaaaaccaagacacagggccgggcgcagtggctcacacctgtaatcccagcactttcggaggccgaggtgagtggatcacgaggtcagaagttcaagaccagccctgtcaacatggtgaaatcccatctctactaaaatcacaaaaattagccaggcgtggtggcacatgcctataatcccagctactcaggaggctgaggagggagaataacttgaaaccggaaggcaaaggttgcagtgagccaagattatgccactgcactccagcctggtcagcaagagtgaaactctgtctcaaaaaaataaagcaagacacagcagacacagcctcagggcaacgccatcatcatcatggactaatgacaatggccaaaacctgaaaaggaaggacttggcctggtgaaagcaaaaggaggaaggtggttcctggcagagggagaacacgagaaaaggctcaaaaagacaaacagtgtgacgtgtgctgagaaccagctgcaggagctggtgggtggtttgggtggtggaggactggcctgagcccaagctaaggagggagggaaggagggaggggccaggaggagaacggtgaacgaagtccaagctaaagggaaaaagaggaaaaaggcctggacttgatgggaagatagcaaaggattttggacacggaatgacatcgtcagaaacatttgtggttgggccaggcacagtggctcacgcctataatcccaacactttgggaggccgaggcatgtggatcacctgaggtcaggagttcgagaccagcctgaccaacatggtgaaaccccatctcaaccataaatacaaaaattagcggggtgtggtggcgtgagcctgtagtcccagctactcaggaggctgagacaggagaatcacttgaacctaggaggtagaaggtgcagcaagccaagatcacaccactgcactccagcctgggtgacagagcgagactcagtctcaaaaaaaagaaaaagaaaaagaaaaagaaacatttgttgttggggtttgttgttttttttttgtttttttttttttgagatggggtcttactaaatggtccaggctagcctcaaactccttgctttaagcaatcctccagcctcacagcatccctagtagctgggactacaggcacctgtcactgcacccagcagaaacatatttttaataagattattctggctatttcctctgtagccttgcagagtgaaggcacttacaatgaaagctagcctgaagctctacccaaacaaccacactgccctgaccaggccgctccctctgcccgtgccgactgcccaagtgtccttccagctcctcccattcagagctgagcttcacacatgtggctccagcaagctgtgggccagatgagccaccagcctggctgcccaccaggttcaacctaatcaggtgctcctgattatagggacaccaggatatagacccaaaagaactgaaaacggtgctcaaacaaatccttggtcactcatcttactagcagcactattcacagtagccaaaaggcagaaccagcccaaatgtccagcaatggatgaatggaacacagtatggcacgcccaaacacagtggaatattcttcatccaaaaaaagcaatgacgttctcggccaggcacagtggctcacgcctgtaatcccagcactttgggaggctgatgtggaaggatcacttgggcccaggagttcaagaccagcctgggcaacatagtgagatgctgtcactacaaaaaaaaataaataaataaaataggcaggcgtggcagcacatgcctgtagtcccagctactcaggaggctaaggccggtggatcagttgagcctggggcccttaaggctgcagtgagctgccattgcaatgctgcactccagcctgggtgacagagagacctgcctcaaaaaaaaaaaaaaaaaaaaggcaggggggcggggtggctcacgcctgtaatttcagcactttgggaggccaaggcgggcggatcacaaggtcaggagatcgaacccatcctggctaacacggtgaaaccctgtctctactaaaaatatgaaaacgaaaaattagccaggtgtggtggcgggcatctgtagtccccgctacgggggaggctgaggcaggagaatggcgtgagcttgcagtgagccgagattgcgccactgcactccatcctgggggacagagcgagactccatctcaaaaaaaaaaaaaaaaaaagaaaagcaatgaagtttgatacatgctacaatatggatcaaccttgaaaacacaatgctaaatgaaagaaatcagacccaaaaggtcacatattataggattccagtaatatgaaatgtccagaatgggtaaatccacaaaaacaaagtggattagtgtttgccaggcggtggagagtaagcgaagaatggggagatggagagtgatggcttaataggcatggggtttccttgggggggtgatgaaaatgtgtggaatttagatagcagtattggttgcagaaaattatgaaggtactaaatgtcactgaagtgttccatttaaaattgttaattttatgctatgtgaatttcatctcaatacaacaaattttttttattatactttaagttctagggtacatgtgcacaacgtgcaggtttgttacatatgtatacatgtgccatgttggtgtgctgtacccattaactcgtcatttacattaggtgtagctcctaatgctatccctccccactccccccaccccacgacaggccccagtgtgtgatgttccctaccctgtgtccaagtgttctcatcgaatacaacaaattttttaaggagcccaggagatgagtaggttctggagccctctccactccaaggtttcggtactcttctcccagatgttacagctttccagactcctgctgtgctgctacctgcctttctggactgactgtggttctctgactagagggagcatctaagtcccctggagatctagttcaaaatgcaggtgcctgggcctcaccccaagagcttctgaggcacagagtctggggtggggtcccggcacctgcattttgttaggtgattctggtgtggtctgaagtttgcaatcaatacaaccagaccctttctcccttttcatcttcggactgttacttaatcaactgcaggacaattcttctttccctcttttcttagtcttttgcaataggagaagacttgggcttcaaaaagaaacaggaagatacttgaattatggagaatgaaacataacccagtaactaaacaaaagcgagttataggtagccttcaatcaatggtcactgaccttggctgaacgtcagagtccttacgggaacttttttaaaagtacctaggccgtaccatggacaccatcagtcagaacctccagagggaggtctagatgttaatattttttctaaagcaacacaggcaacttccctgctctccacctcaccctttactcaaaggtcgctcgaaaaatgcttgtagtaaatggcagtatgagtctctagcttcttaggcaaacataattatgaaagtaaataaggcatgaaaaatcaaatgacacaggcaaatttcagattaagcttttctttttgtctcctgcgtgtttaattatctgtgcttcatgtttgtagggccaaaaaagcggtcaattgcaacgggcatggatctgctccccaaaaataactcacatgtgtaaagcactttcaacttcgatgccgtaaggaagcgttttcctaacaatgatctcctctgatcttcacaacctctccaattattctttcattgattcattcatcaaatacctcctgagaacctactctgtgccgggcactgtgctagtgtacaggacactgcagagacatgacccatctgtgcccttgcccccaccttcaggcccccggtacacaggcacacaggtgatgacagcccagggaagggaagggccaggacgaggaaagtacaaaatgaaaccaagatatggggcaagtctggagagccttgtggggaagaaatgcacaagatgcaccccaaagggtaaggaagagagtctggcaaaacaccgcagaggcggtgccccaggcagagctggcgcaaaggcaggggggacaggaaggaaaccggaaggatggcaagagataagcagggagggaccaggctgcagacggcagttagggccagatcagaaggactctgggaagcactctatgaaaacagaactgcaaatggaaggtagaggagcccttgaaggggtttcagccagaaacacaatcagactcacaacctgcgtgggatactctgggggcctgtggaaaatgatctggagcggggagacgaaggtaccctgaacagagaggtcaccagggcacatagacaaaagatcattcgtacaaaaaaagtagaaagaatgaataagtcctgctatacgacagcataacagggtgactatagtcaaaataatttaattgtacctctggttttctggttttcttggtttttttttttttggatggagtttcactcttgttgcccaggctggagtgcagcggcgcgatcttggctcactgcaaccttcgcctcctaggttcaagcaattctcctgcctcagcttctcaagtagctggaactacgggcacccaccaccatgcccggctagtttttgtattttgggtagagatggggtttcaccatgttggccaggctggtctcgaactcctgacctcaggtgatccacacgcctcggcctcccaaagtgttgggattacaggtgtgagccactgcccctggccctagttgtacatttttaaatgactgaaagatggccaggtgcggtggttcactcctataatcccagctctttgggaggccgaggcgtgtagatcacccgaggtcaggagtttgagaccagcctggccaacatggtgaaaacccatctctaccaaaaaatagaaaaactagccgggcgtggtggcaggcgcctgtagtcccagctactggggagtttgaggcagaagaattgcttgaacccgggaagcagacgttgcagtgagccaagatcatgccactgcactccatcctgtgacagagcaagactctgtctcaaaaataaaataaaataactaaaagaatataattggattatttgtaacatagaggataaacgcttgagggaataccccattttccatgatgtgatcgttatacgtgactatatcaaaacatttaatgtgccccatatacacctactacgcagccacaaaaatttaaaaaactttttaaacaaaggatcgactgaataagtatttaaatcagggatcagcaaactgtttctgcaaagggtcagatagtatttcccagtttttttttttcttttttaacttttatcttagaatcagggggtacgtgtgcgggtttgttacaaaggtatattgtgtgatgctaaggttaggagtaggactgaacctgtcacccaggtagtcagcacagtacccagtaggtagttttgctgcccttgccccctgttctctcccctctctagtagtccccagtgactactgttcccatccttatgaccatgtgtacccaatgtttattttattttatttatttatttatttagagccacatatttatttatttatttagagacacagtctcactctgtcacccaggctggagggcagtggcacaatcttggctcactgcaatctccacctcccaggttcaagcgattctcctgtctcagcctctggagtagctgagactacaagtgcgagccaccaggcctgactaatttttatatttttagtagagatgggattttaccatgttggccaggctggtctcgaactcctgacctcaggtgatccacctgcctcggcctcccaaaatgctgggattacaggcgtgaaccactgtgcctggcccttattttatttttttgagacagtcttgctgtcatccaggctggagtgcagtgcacaatctcggctcactgcaatttccacctcctgggttcaaggaacctgcctcagcctcccgagtagctgggactacaggcgtgcaccatcacacctagctaatttttgtatctttaatagagatgaggtttcaccatattggtcaggctggtctcgaactcctgacctccggcgatccacccacctcagcctcccaaagtgtgaggattacaggcgtgagcctccgcacttggccctggtgtttagcttccacttataagtaagaacatgtgatacttggttttctatttctgtgttcaatcacaaccatcacagctactcatttctgctgctgtgttgcaaaagcagctgcaggggattccacagttcataaatgaacaggtgcagctgacttggccctcaggctgtactttgccagccctccctctaaagcaagcttgttcaacccacggcccacgggcagcaggtggcccaggacggctttgaatgtaacacaataaaaattcataaactttcttaaaacattatgaggttttgtgattttttttttttagctcatcagctatcgttagtatttgttcctgtattttatgtgtggcccagggaagccaaaagattggacacacttgctgtaaaggatcacatccacatggtttcaggaccaatgaggggataatgaaaggagacagcagggcatcagaggagatgaggaggaaagtaggcattgtcaccaatgactcctaaatcaggaatctgagacgcagaggcccagcgatttgatggagggcagtcacacccaagcctcagtgcaaattctcttagcagtgccccctgctgtgccttggcaatcgtaaataaatcagatgtgaacgcaccacacaccctcacatatctgagttgcttactttggccaccccagccttcaactagttcccttaacccatcctctgcagagcccactccctctcatataaacacagaatgcacctaaatcaacttcatgtctcctggggcctcagcctcctgcagagccagagtctcacactaccccgtcctgaagtcctttcagtttataatgagatgatcagttaacctcgacccagcatgtctggggaggaatatgttgctgggaacattcagttctcactccctatcccggtgcaattaacccatcagatctgtcctgttagaaatcaatcagctgagtaactatcaaaaactagatacgggcacagtgcctcatgcctgtaatccagcactttgagaggcccaggtggaagaactgcttgagtccaggagctcaagaccaacctgggcaacgtagcaagaccctgtctctacaaaaactgaaaaagaattagtcggtcatgttaacatgagctgtatcccagctattcaggagactgaggcaagaggatcgcgtgagcctggaagttcaaggctgcaatgaactgtgatcgtgccactgcactccaacttgggtgacagagcgaaaccctttcacaaaaaaccatgcggatgggcacatacaagcaaactggggcccacgttgcttcaccaagtcccagagggccagcttttgaggcccttgttctcttcgctcccagcgtcatctgaccctctggctgcacgtttctcttgcctctggactggacataagcccctggccggcctgcagcaatttcctatctcatgtattcgtgcgtgacatcttcctctcctgttcagagctctcccaatgctgtttctgtaactccagcctccatcccgcccctgagccactggttcatactcccaacttcctagagccatctcaactcaggtacctcactgtcaacctaaactcaacacatgcacagtctatcagtcagtgcttgttgaattcatgtttctccaattaactgtattcccttccacgcccatctatccctcccaaatactgagtttccatcctactctggtatggcctcacagccactgaagtctgaaacctcggtattgccctgtactgttttttcttcctccatataagcactcatctgatcttctgcacggttccttcttctaaatgtctctcaaacatgccttcctttccattttcatcatctcgggccctccctgcctttgggaatactgcattcatgtcatagttagtccctgggcctttggtttctcactcttccaaattattctattatctggtgccagattaatctacaaaaacaccactggataacgtcacgacctatgcaaaaatcccaaacttctctctgatcccaagctcaagggataacacctcacattagcatatacagtttataatttggagtatttcaatgtaccctgtatgccatccgattctccccaataactcgtccttaacaaactgccacgtggaacagcacttctacaacagggaggcgattatttttatttttattatttctttgagacagggtcttgctctgtcgcccaggctggagtgcagtggcgcgatcttggctcactgcaacccccacctccaggttcaagcaattctcgtgccttggcctcccaagtagctgggattacagatgcgcaccaccacgcccagctaatttttgtattttgactagagatgaggtttccccatattggccaggctggctggaactcctgacctcaggtgatctgcccgcttcggccttttaaagtgctgggattacaggtgtgagccaccgtgcccagccaagaaggagattagagcaaaatgaaaagaatgaggaatggcggtgctttctcatcttagactatgacatcattaactaaggtcaacgagtccaaagaggagaatatagccatcttggacagctgggctctgtccagctctaacaccaagatgctttcagaccctgggaaggttgtaacttcttcaggtctcagttttactatctgtatcatgggttaatagtcactattctgcctatatgcttttctgaagggaaaatacagtactagatatgacaatatgtccagttttagaatgaacactgttgtaaaaagccactatatcatgtttcttaaagggaggtccatggattacctacatcagaatctcctagacacctgataaaagtaaagattcctgggttccactccagttctcctaaatgagactctcagggtgaagaagtatcagaaagttgatttttttttttttttgacaaagtctcgctctgttgcccacactagagtgcagtggcatgatctcagctcactgcaacctccccctcccaagttcaagtgattctcctgcctcagcctcccgagtagctgggattacaggcatgtaccaccacactctgctaagttttgtatttttagtacagacagggtttcatcatgttagccagactggtctcgaactcctgacctcaggtgatccacctgcctcagcctcccaaagtgctggtattacaggcgtgagccaccacacctcactccaatgcacacaaaacctcccaaagagcacctaattgcattgttacaaagaagtgatttgctaaatgtaagcagtccccctgaagtggagaagagttaaggcagctgtggcaatatttcagaaccaatgaaccaaagctaaatctagtcaccttcccatgagggtcagccttcagttggttccctgaatcagccagtgtcctggctctctgtgtgtagggttttcatccaattatgcttattcctgccatctgaagcaacactccatttattatgatcaagagactctagctctccacttaagcgcctgttaattaaaagaaatgcctgtggccagaatgcagcaaaaattctagaagcaggtatcagtcaacttctgcaaggagaggtatagaaacttttgccagaaacacacatagcttcttcttaaaatgaccttacaagttaaatcaccttcatttagaaggcaaagtggattggagggcagagagaaacgagggggaaaaatgaggccaaaaacacctgcaaagaatctggagcaaatgtttccaattaattccactgtgacttcctattttagaataagtaaaatactatgaagttaagtaaaatatataaagcaactattttcagggactagacaataatagactatgcagggctgtgatcctagccagacggaaaacatgcaaagggtgcaccacgttcacctgaacactgggggcaggtagggactttccaaactgcagcataaagaaatgcagcagtatacagaaaaagattgaaattcaggatgctggccaggagtggtggctcacatctggaatctcagcactttgggaggctgacgcaggtggatcacctgaggttaggagttcgagaccagcctgagcatcatggtgaaacccccatctctactaaaaatacaaatttagctgggcgtggtggcacgtgcctgtaatcccagctacttgggaggctgaggaaggagaatcacttgaacctgggaggcggaggttgcggtgagctaagatcacgccactgcactccagcctgggcaatatagacttcgtctcaaaaataaaataaataaaaacaaaataataaaaaataaaattcaggactgctgacacagctgtaatttgcagagtaggataccacagaggaggatcatcacacaaacaagaaatctcagaaatatgcaaagggatatccatgagttgctgactaaatactaagctatgcatgtgcaaagtaaaatgctatgaggcctggaaaagagaattctttctaagggactgtgagatgaacggagattccagaggtcatatggtactagaagataaaattccaactagtcttagcaaggaaatctcactgtacaccccagtcattcagttgagaccctaaagatcctctttaagggcagagctattctaggcctcgagtaaaagctactctatacccatcctagcaaagctgaaaaccaagactttacaggatcaagttgaaccaccagtaaattatctgcctgtcagaataaaatccatcactctttaagatgactaaatctagtctcttaacaatagaccactgacaatgtccaatatacaataaaaaattactagacattcagccaggtgcagtggctcatggttgtaatccaggcactttgcgaggccaaggtgggaagattacctgaggtcaggagttcaagaccagcctggccaacatggaaaaaccctatctctactaaactacaaaaattatccacacgtgatggcaggctcctgtaatctcagctactcagaaagctgaggcaggagaatcacttgaacctaggcagcagaggttgaagtgagccaagatcacaccattgcactccagcctgggaaacacggcaagactccataacaaaaaaaaacaataaagtaaaaataaaataaatcaatctatagacccaagaagcacaattaaccacaaaaatagggctattgcagtcctcagataaagggtatccatcccaacaaagcctaaaaccaagacttgggagtatcaagcatattaactgcctgccatgacaacactcaaacttctttaagaaaagacaacaaaatagagatcctcaacaacacaggaattaccctgtccagcatacaataaaaaattactagacatgagaagaaacaagaaaatgttactaatcactgggagaaaaaaaaaaatcaagaaagataaacataaagaaaaccacacaaaggcataacagagtcaaaatgctaaaaactaatgataaagtcttaggagcagccatagaaaaagtcacattacatataggagaacaatgctgacttctcatcagaaacaacataagccagaggaccttagaatctcatcttcaacgtcctaaaagcaaaaaaactgttaacctagaattctatatccagtgaaaacattcttcaaataatgaaggcaaaataaaaatgtattcagataaataaaagctaagagaatttgtcactagcaggcctaagctataatgaatattaaaagtagttctccagatggaagaaaaataatattagataaaaatatgggtctactgaggactgtcactgaaaagcagtgaaaatgaaagtacatggaaaagtcaaggctgagaaaatatgaagactttttctcactttaaagtttcttttaaagacaaccgattgttaaagcaaatatagcaatgtactaaagatttatgacatgtgaagaaataaaatgtatgacaaaaatagtatgaaccaaagagggataaatagatgtatagtgctattaaggctcttatatcatacatgaagtgttaattcgaggtagactatgataagacaattacaaggtagactatgatggaccattacaatgttaattcaaggtagaccatgataagttaaggaaactgtaatccctacagcaacctgcaaacataacacaaagagatacatttttaaatccagtaaagaaactaaaatggaatactaaaaactattttattaacccaaaagaaggcaggaaagcaggtaccaaagagcaaaataaaatagatgggataaatagaaaataaatagtaagatggtagtcacggacccaatcacatcagtaattatattaaatataaattgactgaacattccaattaagagacggagatccttggactagatgaaaaagtaaaacacaatgttatgttgtttattaaatataaagactcaggtaaaggtacagaaatggaagaagatataccaaggaaacactaacaaaatgaaactggggtagaagtaactatattaatatcaggacaaagtagacttcaggacaaaaagtattataacttaatttcattgagaataaaactgaagaatcacactccttctccttctatctagaaaagtgtccatttcgagttatgtttggaaaattttcaccatattcagagccctttatgtactgaagatgacgggacagaatgtcctcgcattctttatatcaggtgttacaaacagaatatttgtgtcccctcgaaaaaaattcatttgttggagcactagccccagtgggatgggaagcttttggaggtaattagggttacatgaagtcatgaggatgggaccctcataataggattagtgtccttgtaagaagagacatcagagagctcgccctctctcattctctctaccatgtgagaacacaagaaggtggccatctgcaagacagaaagagagccctcaccaggaactgaatctgccagcaccttgatatttttctgttctttaagccagacttcagtatttttttatggcagcccaagccaatttagatagcaggaacccacttagctgatgtctgccttgacttttacatggagcagtatttctaaaggaaaccaagtgaaatctgaaaagaacttctgcttcagcttatactgttcatgacctccccaggggaccatgtgagagagaacaatgcttttgggtttttggggggtctttttgtttctttctttttttttttttttttttttgagacggagtctcactctatcacccaggctggagtcagtggtgcaatcttggcttactgcaacctccgcctcctgggttcaagcaattctcctgccccagcctcccgagtagctggggctacaggcgcgtgccaccacacccggctaatttttgtacttttagtagagacagggttttaccatattggccagtctggtctcgaactcctgaccttgtgatctacctgccttggcttcccaaagtgctgagattacaggcatgagccaccacgcccagcccggagagaacaatgctttggctttccagtgcttttcacagaactccctccctcccatgaattggccaaactacatctctacccccaaacttcacttctcatttcttccctgacaccagccagaactgtttatctaactctccaactttggttcctgagcctggggacctgcatcaacactaccagcaccacgatcaatcccagaggagatggaccacgcaggcatgaccaggacctgctctatggagcacccagctaggggtacggttataagcaagacagacacggtcccagtcacctttgccaagaagaagggatccagtgaagattagatgcatactcagttcccttactctttctttctttctttttttttttaagacatagtcttgctctgtcacccaggctggagtgtagtggtgcaatctcggctcactacaacctctgcctcctgggttcaagcaattcttgtgcctcagccctactcaagtagctgggattacaagcaggcaccaccatgcccggctaacttttgtatttttagtacagacggggtttcaccatgttggccaggctggtcatgaattcctgcccagctctgcctcccaaagtgctgggattaccaacgtgagccaccgctcccagcctctttccccttccatactcataatcatctttgccaccctcggctatcgactggttcaatatgcttccacggtggcttctgggcatttttcataaacatgtggctgagctcaagagacagcaagagaggacaggtatccagttacaactttatggcctaacaaatgaaaaggtgttctacccacggagaaggaaatctaagtcctagaaggttccaaccaagcctatctgcactcaagactccccaccactcttagaccaagaacaagaaccattccgtgcttaaggagttcccctcagcaagccagcccacgcagtgcgtgtgtgtgtgcgcgcgtgttcgtgccagacccacggggtcctccgggaatatatatcgacaacagaggtgggtttctgaaccctggtcaaaagccagagagcagacacgcttgaaatgctctgtgccactgactgcaaagccacagatatttttcctgcagcctcaatgagcaaggactgtgtacacagctaacacacatgggcatacaaatgcatagaacagtattcaccagctgccctagaaaaccaagagagcatatggcaagaaagagagagttcatggcatgcattcccatcacctaaatgcgcacttgcaggcatccacagaatggtcaaaactgctgtcttctctaagaatcagccagcaggccgagtgcagtggctcatgccagtaatcccagcactttgaggggccaaggcgggcaaatcacctgaggtcaggagttcgagaccagcctggccaacatggcgaaacctggtctctactaaaaatacaaaaactagctgggcatggtggtgcacacctataataccagctacccaggaggctgaggcaggagaatcgcttgaacctgggaggcgaaggatgcagtgagccaagatcccgccattgcactccagcctgggagacaagagcaaaactccatcttaaaaaaaaaaaaaaaaaaaaaaaaagaatcggccagcccaccatactaggaaattgccttcatccccttttcagcctgtctgcatgccagcaggacccaaaacaacatctgaacatcttcctaaaagtcacgggaggctgtggaatgcctccaaaggtggaagaaacaatgctaaccatggcttccagttgcccctgggaatacatttggtacccaggacagcctgaatgccagctctctccaaacttcacactatgaagggcctgtggcttcagtgtgtcaagagcaaccccaccctgtgaattaaaatatcctgtttcacaaagaaaaaaaaaaactcagttttcctttgccagtgaacccttctgaacaataagctttctcaaccctccccaagcccagaattatcaggcaccgcttccattactgcaagctcacaggtttcctcccttagaaactgaagtattaattagtactgtgtatttgtattccttagcctgccatgcccctcagggcatagccagccagcccactgttccagtgtcagggaagcgaccactggttcagaacgcccagtgcccaactaacagctgagctcctgccactctaccatctttcaatcacagtgcctaaaaaaaaaaaaagatgttaccctgggctgaattgtgccccccaaaatccatgtatcaaagctctaaccccctatactttataatgtgactgtatttagagatagggccagtagaaaatcaacgttttaaactgaagatgggccaggtgccatggttaatgcctgtaatcccaacactgtgggattccaaggtaggaggactgcttgagcccaagagttgaaaaggtgtccaatcaaaatggtgctggttttttttgttgttgtttgtttgttttgtgtttttgaggcagtgtctcactcttgcccaggctggagtgcagtggtgtgatctcggctcactgcaacctctgtctcctgggttcaagtgattctcctgcctcagcctcccaagtagctgggactacaggtgtgtgccaccacgcctggctaattttttgtatttttagtagatatggggtttcactgtgttagccaggctggtctcgatctcctgactgcgtgatccgcccaccttggcctcccaaagtgttgggattacaggtgtgagccaccacacccggtcccaaaatggtgctgtttgggtgggccttggtccaatgtggctggtgtcttcatggaaagaggaaagctgggcacgtaaagaaacaccagggatgtgagcacagaggcaagactgtgtgaggacacacaggaaaggcagccatctgcaagccaagtggagaggcctcaaaagaaaccaaccctgccggcaccttagccttggacttccagcctccagagctgtgagaaaataaatttctattgtttaagccaaccctgtatgtagtattttgctatggcagccccagcgaaataatacagatgtgtagacagtgaagtaaaaggtccgactgcagaactgccaccttctttggcctggggctgcccaatccacccaacatgccaccctcttcagatggcacaactgtgtccccacactggaaggatctgctattgccccagaggctttctacagccaggcagaaatttcaacaatagctcaaccccaggatgcagcatatagcttgaagtagaattgcccatctggagcctcaacagagtataagaaagcacaatcctaaaaatggggcaaagggctactgttcaatgtccccacgaaacgagtcgggcttacttgacgatatcaggcttattgtagagactctcaggtggctgctgctgaagtttgtcctttttgttttctgtgagatactcttttcatttctcctttttaattccctaagatattctttcgtgaactagaatcagaatgctaaagatgaaggaaatctacgaaggagaaataaatacatgcaaacacacctctgggaggaaaactgcctcttggaacatctgtcacttctaagacagttgtcatatttgttctctcaatagcagctccagccagccaaatattgataccagtaaaagttgtgtacatttttttttttagacaaagtcttgctatgccacccaggctggagtgcagcagcgtgatcccggctcactgaagcctccgcctcttaggttcaagggattctgctgccttagcctcctgagtacctgggattacagacacgcaacaccatgcccagctaatttttttttttttttttttttttgtatttttggtagagacagggtttcaccatgttggccaggctggtcttgaactcctgacctcaactgatccacccacctcggcctcccaaaatgctgagattataggcatgagctaccgcgcctggccaaaactgggtacatattcaaagtacacacgcacactgttcatttaagcttcactagaggcatcttctttgccatcacaatgagaactaaaataaactgaacatggttgaggactcagataaattaaggcaggagctgagaagagggtgatccctgcttgccagcctcccccaccctcctggagcccgtctgggcaggactgttggccaagtccacgtggaggagacagcctcagggtcacaggcacctgttacctacttgggcagcctcctcaagatactgaataccaagagagggagaggagggggaggggagcacacatctcccaggaaaaagtctgccaagatgcaaaccaagctgcgaaaagcaagcagcaacaacacagacagtatgttgccatttgtttttcagaaaacatgaaacaaaattccatctccagatgtacatgcaaacatatgtaaaagcacagagcagtctaactactcaaccacggagagatggctgagcaaatgaactggatgacagaatgttacgtaggtattaaaatatcatcaataaaaatcatttcaaatttaaaaataacacaaagagaatgcacagactgattccaactgtgtaaaaatgtatgcttgcacatatgcaagaaaagaagatcgaaatagagtcagaagaaaagaagatcgaaatggagtcagggttcctactgctataaagtcgatttaaagtatactcaaacaatacaagcaaattggaaaagtgtttatatttcaataattaaaaaacacagtatcattggttttctttaaaaaaggaaaaggggctgggcgtggtggctcacgcctgtaattccagcactttgggaggctgaggcaggcatccgcctgcctgaggtcaggagtttgagaccagcctggccaacatgctgaaactccgtctccactaaaaacacaaaaattagccaggtgcggtggcaggtgcctgtaatcccagctactcaagaggctgaggcgggagaacaacttgaacccgggaggcggaggtcgcaatgagccaagattgagcaactgcactccagcctgggccacagaggaagatccacctcggaagagagagaagagaagagaagagaaaagagagagcagaggagagaagagaggagaggagaaagagaagagagaagagaagggaagagaagagaagagaagagaagagaagagaaaagggaaaagccggctgtggtggctcacacttgtaacaccagcactgtgggaagctgaggtgagtagattacctgaggtcaggagttcgagaccagccatggtgaaaccccatctctactaaaagtacaaaattagccaggcatggtggcgcatgcctgtaatcccagatagttgggagactgaggcaggagaatcgcctgaacccgggagggaggcagaggttgcagtgagccaggatcgcaccattgtactccagcctgggcaacaagagcgaaactacatcaaaaaaaaaaaaaaaaagaaagaaagaaagaaaagagaagacaaaagaaaagaagagaaacactagaatgatacccgctaaactggtaacaatgtttgactggttggtctgggggaaaagataaaagtaggagaagggttttcacataaaatttttataaactgttttataacgagatttttgtactgtattgatgcgacgctaacatgactaaaaataaagaattgaccttggggacacacacacactaccctcctccccaccctacccatcaacccaccaggagaaaaatcactgttttaaactgaaggcgggccaggtgtggtagctcacacctataatcccaacactgaagagggggaggccaaagtaggaggattgcttgagctcaggagttcaagactagcccgggcaacatagggagactcctgtctctaccaaaaaaaaattaaaaattagccgggcatggtagcacacgcctgtggttccagctattcaggaggctgaggtgggaggatcactggatcccaggaggtcaaggctacagtaagccgcgatcatgccactgcactccagcctgggcaacagagcaagaccctgtctcaaataataacaataataaactgaagatgacagtttcccacatactgctataccttaacttcacatagaagcacaactgcaaaatcagaaacatgtcaatgtctccaaacagctgttcagtgtcctgtctgtttctgcctagaaccatcctaaggggagcatgggctccagctggcctcgaaagcatttcccatcatccgacccctcaccagcctcctcccaggcccagtaggctgcaccttccttgtccaccccctttttttctcccctttcattaagacgccatttggcaaagtctctgcaaatccctgtcagttcacttcccattaacagttaccgcagagcttctctactttattcccagataaataattgaaaacaaacacccagtttggagaggaacttgaggcatctgaagttaacaaagccacaacggcttcatcctgacaggctcttctgagtaatgccctttccatgagcaatattttgctttgcctccaacagagggacagataaatctgaaaggctgaaggaacagaaatggagttaaagaacacagtcatgtgttaaccattctcttcccaccaacccaagagtgtgatgcccttcacgtcccgaacacatataaccagggtgggtggctctgacgctcccaggcattggggcctgtgcctgaatggtcacgggcaagggtcaaatcagggcactgctgcagaatccttcaagccatatcgctgccttttccagacttccgcatctccttatttctccaggtgaaataacacagacactgacccacttcctttcaccccaacaaactccaagcagacgtgtccccaggggatagaaaggagaccctgaggttttctgcagacaggccccctacatcctggggcccgtcccaaagggtgagagccccttggtcggaaccgcagccaaaggcttttcctctgccttcattctgctcctggggccatccgctgaattgtgggactccatcatcaggggaatgaatcaggaactgaaatgatctggggctgaatttacccacaaaacttcccacagcctcaaaagccactggttcatagatcccaagaagggcaaacatcctgaacacaaattctagccctgctcctaccctgttagactataaacgcgtgggtgctcagtcgatgttggccaaccgcaacgactcaagatcaaaacccattaactccgaccccacagagcatcttcgatagatccaagctgctgcccttttcaggtctggtgagcaaattaatagtgaaaccaaaggaaacctttggccagcctcagagtgaaggtcaacagactgtttccaagcacaactctttcaacaacatttgtattcactgactgtagcaatcataagtaattctcatccatgtatgagaccttctaagacaaattccccctctcacatcgacagcaagaattcatttctttttaaatctcctagaacagatgtttactgtcaggctgacctttctgccaagtagtgaggttctgggcatttgtggtgatgatgtctgtttctgagctgctgcaatccctccccagacattcaccagctgctcccaaaccattactgattctatccagggcttccctctgggatctcctccatattcaaagcatatattagaacaaatatgaaccaaaaggtttaaaaaaaaaaaaaaaaacactgctgcagccgggcacggtggctcatgtctataatcccagcactttgggaggctaaggtgggaggatcacttgaggtcaggagttcaagaccagcctggccaacatggtgaaaccccatctcaactaaaaatacaaaaattagccaggcatggcagcaggtgcctgtaatcccagctactcaggaggctgaggcaggagaatcacttgaacccaggaggtggaggttgcggtgagccaagatcacgccattgcactccagcctgggtgacagagtgagacgccgtcacacacacacaaaaaaaaattactgctgcatagtgcaaattagccaatgactgtttacaccgcccagagaaaatccctacattcagacagctgaccaaatacatctgataccgccccaccacccctactccccagtaacatagtaagacccacaaggattgcagagtcctttccaagagactatcttggaagcccagttgggtgcaggagagaagagtagaatgggatccagcaggagccatgcagagccactgagccagatctctgcctgctgctcagggattgaagccactggtcacctgtcagggcaagcagaatacactccaacaacaagttcacacaaaaccagggtggccttgagatcagaatatggcagcctgcattgagggccactggacgccactaccacacatagtcggcagcaaggaagccacatgtccaggggacggagacagacacggccactcaatctttttttttttttgagacagggtcttgctctgttacctaggcaggagtgcagtggcaccatctcggctcactgcaacctccacctcccaggttcaagcgattctcatgcctcagcctcctgagtagctgggattacaggtgcgcaccaccacacccagctaatttttgtatttttagtaaagatggggtttctccacgttacccaggctggtctctaactcctggcctcaagtgatctgcccgcctcagactcccaaagtgttggaattacaggcatgaaccactgtgcccagccatgtcactcaatcttttaacaacaaaaaatgacacatggtctttaagacagtggtccccaacctttttggcaccaaggactggttttgtggaagacagtttttccatggacaggggccggggtagggggttggggatgaaactgttccacctcagatcatcaggcattagttagattctcttaaggagcacgcagcctggatccctcacatgcgcagctcgcagcagggtttgtgctccattgagaatctaatgccacggctgatctgacaggaggcggagctcagaagataaagctcacttggcagctggctgcccacctcctgctatgtggcccagctcctaacaagccattgaccagtagcggtccttggtctggggggttggggacctctgctttaagacagtatcacagccgtccaacatcacattcagctgtctgatccaaaggacagttcttctgtaacacaaggaatctgttttacattagcccaggacctagaggcatagttcctgggaatcgttatagttacagaatcacccatcattccttctctttctccacttgggaagttaaggaaaaaagaaagcaggaaggcagggaagagaacttcaacctacctacctcccggggtacatgaccactgactccagtgagtctgacttaatcctgtctcaccgtgatccagcaggagaaatggactttgacccatttctctccagagagttctccctgcaccacttccctttctaggggagcagggaactctggcaccagttcaggggtgcttctgccatctctagaacttgtcgggcccagtgtctggtaaggctgtctcatgctgttatgatcttggacccctttcctctactgacagtggtgcatgcagatgacagggctttagccaatggcttgcggttcccatcgcatgacctggccccagctctcttggctcggtgatcacagccacatgccaggctgcggtttgcacggtgcttccctgtaagcacatacatgctcattcccaaatccagctctcctgccatatgtcagtaaaaaagcctgaaatctctggcttatccccaattccagtgcatttttacatttttaaaattttactgtacagtccttcgggggagttatcctcaaattaaaggatggaaaactagagctcagggatatacaatcagtaaatggcaggtgtgagctccagcccagacccctgctgcacagagccctgcctcaccctcctgtcagccctcataatgtgatccatggtcaaaggcctaatgctacagattgtgggggtggggcgggagtatcatctccctgatgatgtcatactctcaataaaacccagcaccacagtgatcgttctaggtcctctcatatatatacagtgccacccagcacatcagctgtactctatatttttaatgaaatgtgacattcaaaatccgaacttactaaaatgtaaataagggggtaattaccaagacattactttaagaaagaaatcaccgatcagttcctctaatgccttgttctctgtttaaataccactggctacttaacagagacattaacaggtatgtcaggtttgatcagaaataaattcattgcacagagctggttgtatcccgatacgacagctaaaagtagagtggtactcaccaagtgaggcatcaggaggtcagccaagtagacaaaagccgctccaagggtgaagccaacagccacagggaagaaggcaaaggcaccgaagcccccagaggacgtggccatctcaactgctggggccagaagagaccaataggaagctgccaacatgacctacaaaaaccacaacgagagataaacgttaaagcaactgcagaaggctttccaggcaggacctcagttgctctctgtggcccagattgacccctacaatttcacatgagttcagtctttcgtcccaggttgggaggtactatcagaaaccaaaaagccatccccagaattcccggagcttactattgcaagaactcaattttgggtaggatagagttgaccttgggaggatgcagtccagttcgccatcatctagcctataattcagtggttctcaaccagcaatggttttgccctccacaggacatttggcaatgactagagacatttttagctgtcacactgggaggagcgtagggggaggttgctactggcatctaatgagtgaggccaagcatgctggtaaacaacctacaatgcacagcacacccctgacaacaaagaattatctggccccaaatgtcaatgagaatgctgttgcgaattcctattctttttttttttttttctgagatggagactttctctgtcacccaggctggagtgcagtggcacaatcttggctcactgcaacctccacctcccgggttcaagtgattttcctgcctcagcctcctgagtagctgggattatgggtgtgtgccaccacagccagctaatttttctgtattttttagagatgggattttgccatattggccaggctggtctcaaactcttgaactcaggtgacccacccacctcggcctcccaaagtgctgggattaaaggtgtgagccaccatgcccagcccaaaaaatcctattttaattaaattcttccaagacaaattgctcactacttcacgagttccactgtattgtaacacaggtctaattattacaaagttctttcttatgttgagctgaaatctgtctcctttccacttttaccttttagctgtggttttgctccctagaacaccaaaaactgtgtccctcctgtgtgatatgtgacagcctctgaaatatctgaagataaccagcaagtcaacgtcatattggtctcatcaattatctctaaaaaggacgaagggaactaatatttattgatcacttggtatttccaagggccaagatttacatttgatatcttatcttttcatcacaaccaccccagaggcagatgatgttttctattgcgatttgtagataaagaaattggatcttgaaataataaggtaatttgctcatggtcctacaggccagcggtccccaatcctttgggcaccaggggccagtttcatggaagaccatctttccacggaccaggcagtggttttgggatgaaacagttccacctcagatcatcgggcattagagtctcataaggagctcacaacctagatccgtggcatgtacagttcacaatagggttcacgttcctatgagaatctaatgtcgccactggtctgacaggaggcggagctcccgcggtaatcctcactcacttgtccgctgctcacctgctgtgcggcctggttcctaacaggccatggatcagcactggtccatggcccggggattggggacctctgccataggcagtaagtagcagatccagggaaatgaccaagcaggaccataaccaactcaatgacggtagaaacatgaaggagaagaaaaaaaattaggctagtctcaaatctcagcaaagtcaattcaataaaaggttctccagcagatgagctggcacagtggtgcatgactatagttgctggagatgagctggcgcagtggtgcatgactgtagtcctagctactggggagccttgagcccaggagttcaaggccagcctgggcaacatagcgagactctgcctcttaaaaataagaagctctccagcactgaccaaactaaacactcatccatggctgtttactcttacagatgctatgacatcttttggctagagtacacccaccacccatcgtaactatacggcagtcatcgccgacacagaaaatgttgaatgggtttctaaaaattacttaattatgccttgccttaaaaaatcatctgcatcacccatcttcaaaataacactcagagtgacagaagcaggtattacaacagcaacaataaagaacaaatccaagcataaatccataaattcccttcttccagctgtcaaacatgcacagtcacttgctctgggccaaattctcccagcaaaagtcttagtgccacccatggaaacctgcaaaagcctccaaaactctaagaatgaaaatgcctctgctcaacaggatgggagctgaggctgatccgttcaactccatgagccgggctgtcaataaagaccatcaaaggaaatgtgagggctccccctccctgctacagcctaatccaccccttttccagactttgtcttactagctttagaattcaacagccctcagtagctgccctgcatggtaaactccccatcgaagaggacctgcaacaagacacagagatggaaaggtgcccgttcttctttgcattttttgaaacagagtctctgtcacccaggctggagtgcagtggtgcaatctccgttcactgcaacctctgcctcccaggttcaagcaattctcctgccttagcctcccaagtagctgggattgcaggtacttgccaccacacctggctaattttgtatttttagtagagacagggttttgccgtgttggccaggctggtctcgaacttctgacctcaagtgatctgcctaccttggcctcccaaagtgctgggattaaaggcgtgagccactgctactggcccaattcttctttttaaacctgacctgtgcagcagcttctctggttctcccatacggtcccaccttcaacaactctaaaaccacatggcccaagtaagcccactcatctcaccctctaaatcctccccaccctgcactccgatgaaaaaacataacatcgctgtcagcatcacttgagagacgtccccaacctctgctctcatctccttttcaaccccaggtccaaactcttctgtccacatttccttccatccctctgcatcactgagtaccaaccttttttctgcccttacacatgagaagcacacaatccacaagctattcaaggagcaggagcagaagagaagtgtctctcaagggagggtgtgttggaatttgggatgcttgcaatgcaaacgcatcccagctgattcaggtaagcccccttcttgagaatcactgccctttatctttccagtcaaatttaggatccagctggatttccttcatttcttttccttgtgagcctccctgcctcacacacaaactggaaaaccaccaaagaacaatcgggaaattgaatagggttgcctgtctaaaatgaaaaaagcacccaaagcaaaattctttttgttttttgtttttgtttttgtttttgtttcgagacagagtctcgttctgtcacccaggctggagtacagcagcgtgacctgcaacctccatctccgcctcccaggtacaagagattcttgtgcctcagcttcccaaggagctgggattacaggcatgagccaccacgcccagctaatttttgtatttttagtacagacagggtttcaccatgttggctaggctggcctcgaactcctggcctcaagtgattgcccacctcagcctcccaaagtgctgggattacaggtgtgagccaccgcacccggccaaaaagttatttaaagggcgagtggggtagaaaagacgactgtatcctaatgcctaaaacctgtgaatatttcaccttacaagtaaaaaggactctgcacatgggattaaattaaggacctggagatggggagatgatactggcttatttgagtgggaccaatgtaaccacagggtccttacgaaggagtgagaagggtcagagtcgtgaggtcaggagtttgagaccagcctgaccaacatggtgaaatcctgtctctactaaaaatacaaaaattagccgggcatcgtggcaggcacctgtaatcccagctactcaggaggctgagaccagagaatcacttgaacccaggaggcggaggttgcagcgagccaagatcgcactactgcactccagcctgggtgacagagcgacactccatctcaaaaaaaaaaaaaaaaaaaaaaaagaagggtcagaatcagagagaaaatatgataacaaaagcagaggctatagtcagaaagagattgaaagatgccatgctgctggcttgaggatgaagaaaaggccatctgctagggaagggaggtggccccaagatgctgagaaggcagggaagcaacttctcctccaaatcctccaagaggaacccagccctgctgccaccttgactttgtcccagttaaaatcactgtggacttcagacctccagtactgtaagataataaatttgcactgttttaagccactacattcatggtagtttgttacaacagcaatagaaaattaatacaggcacatgttacttttcttaaactttattttttagagcacttttagattgatagcaaaattgagtggaaagtaccaagaattctgacataggcctacctgtccccacatacccaaaactttccccactatcaacatcacaccacagtggtacaattgatacagctgatgaacccacactgatatggcattaacaccgaagggccatcgtttttttgttttgttttttgttttttttctttgcttgttttgagacagggtctcactctgtcacccaggctggagtgcagtagcgtaatctcagctcactgcaaccgctgcctcccatgttcaagtaattctcttgcctcagcctcctgagcagctgggattacaggtgcccaccatgccgcccagctcatttttgtacttttagtagagatgggttttcaccatattggtcaggctggtctcgaactcccgaccttaggtgacccacctgcctcggcctcccaaagtgctaggattacaggcatgagccaccacgaccagctggtccatagtttccattagggtccactcttggtgctatacattccatggattttgacacatatataatatcatgtatccatcattactgtatcatatactttcactgccctaaaaagtccctgtgctccacctatttattcatccctccttccccgctattccctggaaatcccttttcactgtctctatagttttgccttttccagaatgtcctatagttgaaatcacacagcatggaacctttccagattggcttctttcacttggtttttaatgcatttaagattcctccatgtcttctcatgacttgataaagcatttccttttagcactggataatattctattgtctggatgtaccacagtttatctgttcacctattgaaggactttttggttgcttctgagttttgtcgattatgaataaagtggctataaacacccgtgtgcaggtattggtgtggactggaagttttccattcatttcggtaaataagggccaaggagtggaattgttggatcctatgataagcatcactttttaaataatcccccagcacaggtggggaggtgaaactctcaacatcagcaatgctcctttatatgttaggcatttttaaatctgggtgtagtgacatatgaactagctggtgcaggaatagaaagcagggtatctgattacctctcaactatccctaagaagcagggcctggaacgggcaggccacagaggagaaggtgctgagtaccaggcccaagacttcagggaatacttttgccagccagtcccttcatagccccggatggtagagaacaaaagtccttctgcagctgtgaccccgcctgtaaaggcaaacaagtgggctaacagggccatcgctgaagacaccaggtataaccgtaaggagctgatggttggcatcttccttttcctcacctttgtctataaaaggaatccataatcagcttcaacacacatggcaggggcctcgctgtacccccaaagtcttttttgcctctttattcctgaaatgaaaatgaaaagcccacccaatcgaatgaagccagggggaaggtttgggtggggcccatcctccaagttaaatgttgctaagaccaaagcagcccaatttcttttgctaaataatgaaagaagctcaaggatgagtatttcaatagcaaaagaaaactcgtggcagggcacaggggcttacgcccataatccaagcactttgggaggccgaggcaggcggatcacctgaggttaggagttcatgaccagcctggccaacatggcgaaaccccgtctctactaaaaaacacaaaaattagccagacatggtggcacacacctgtaatcccagctactcgggaggctgagacatgagaatcacttcaacccgggaggcggaggtggcagtgaactgagatcacaccatggtactccagcctgagtgacagaacaagaaactgtctcaaaaacaaacaaacaaaccaacaaaaacaactcttgcaaaagggctaaggaggaaatgaaaaaacaaaagagaatggattgaaagtctaacttcagtctttggctggtttggtaggtctaccacagggctcagaagtctcaatgctgaacaaagtgattcccaggcaaggtgatatttaagaagctgagtataggctgggcacagtggctcacgcctgtaatcctagcactttgagaagcctaggtgggcggatcacctgaggtcaggagttcaagaccagcctgaccaacatggtgaaacgctttctctactaaaaatacaaaaaaaaaaaaaatagccagacatggtggtgggtgcctgtaatcccagctatttgggaggctgagacaggagaatcacttgaacccaggaggcagagattgcagtgagctgggatggagccactgcactctagcctgggcgacagagcaatactctgttgaaaaagaaaaagagaaagagagagagagagaaagaaaggagggaggagggagggaggagggatggaggagggagggaggagggaggagggagggaggggaggggacgagttgaggttgagactactggcctacccaaccgttagggaccccatttgtactactgcccctggttgttgctgaactcttctgctccctcaccttggcctaagcagctcaatctgtgacaacaccaaaacgccaagacccatctcccatgccccttcttccgaacaccctcaactctttgcccaagtccatatttattatgggaaaatgcaggacttagaatcaagtccgagtttgaatcttggctcagctacttactggttaggtagccccagtcaaataacctaagctctcttctgcagctcagttttgtcacctgaaaatggtacatttcacaggattgtcctaagaatcctgagagtcaatgcaaataccaccccaacccgattcccagcaggaaatatgcaacgggtcagtgctgttttggattcatccctctccccgtatgccttctgcagacatcctctcttcctcctcccatcttgcgctataccccacttctaaggcggctcttttccataacactagattcatcactcgtgtccatgtcccccagaacgtcgcacatgcccaggagagtgctgtgccttaagcatctctgtacctggcacccccatcagagtagtcctggacagagcgactattcaacatttgttgcctaatcgcattctctgtcatccttgctaatgaaggggaggaacgagggtggagaaatgagaacgcatgatcaggaagtgattcaacacccattttttggtctaatgcctaatttttacagtaatttttagcttccaaattaagtattatacagactcatactcaaatgccttctgtcctttcacaaacatggggtgagtaattgtttaaaataattgagattttcatgggtgtggaaaagggccaacgcagaattttcgaagcttcacagataatctactgaagtctactgatagaatcacagactcacttagagtcaaaggggactttaggagaccatttaatctaaaaacctcacttaacagaagaaaaggctgacaccaaagagattcagtggctttcccaaagccccagagcaagctggtctgtcccaagttgactgtgctaccctctacccctacttgacaactcagaatcttgtaagaaattctgcgggctacagagtaaaggccaggtttaagttaccacctcccccattatcagggaaggaatcccaaagctgaagtccgagatgaatcagtgtcagcaataactgaatgcaatcgatcccatagcattccccgatattctgatagaaactactccaagaaaacccagcactagaaaatttgtggccactaatgaacagggctaataatcctgttaaatacttgcttcacaaagataaatcaaacctcacaaacttaaacccattaatatcccatgacttccttagaagtaggtagagaaacaagcaattttgtaagtcacactagaatcccctcccagcagcacagctaaagttggggatttcaaaacaaaacatacagatgttatacttttggtctaagtctctgaataaaaggtacgcctccctctgctgtaaattacactttaaaataggaacagtttaaaagcagtttgtatcctgattggtatctgagaacagaagaaggacattggtggggaaactggtgacatccaaataaagtctggagtttagggaatagtaacaaacaaatgttaattcttagctttgacaaatgtgtcatgattatttatgtaagatgttcacattgggggaaactggatgaagggcactattcagaaattccctgtattatttttgcaacatttcttaaaatctaaaatacttccaaataaagagcttattaaaagttaatgattataacatgcccaggcacggtggctcatgcctgaaatcccagcactttgggaggctgaggtgggcagatcacttgaggtcaagagtttgagaccagcctggtcaatatggtgaaaccctgtttctactaaaaatacaaaaattagccaggtgtggtgatgcactcctgtagtcccagctgctcggaaggctgaggtggaagaatcagtcaaacccaggaggcagaggttgcagtgagacaaaatcacaccactgtactccagcctgggcaacagagtcagactccatctcaaaaaaaaaacaaaaaacaaaaaacaaaaaaaaaaaacagtattaacagtatcacttactcagtatatccaatcagagaataattcccctctaaatctaattttcaaaggtttactacactaatgtgaaattcctagtccactttggaatatcacagaatgtacgttgtagggcttctaattaaacatggccaatggaacacaagcttccaaattctcactggagtaaaggtacagggatatgaaggatccaaaggccaaagtcagaaggaaaggaagaggacatggcagccacattttggaagcttgaagagagaagcaggtaatcgctgatggatgctcaagaaggctgccacctggggctgaaggaagagactagaaggaaggtgcttcatcccacaaagccccagaatagccagggagcctttgacaatgagtgtgcagatgggcctaaaagagacctgatggaagcctgggtaagaagcaagtaaactccagattcctcctgtaccccaggcagccaggcaactgtcccaccagacattgcaggacccccagcccagctaagggtggggataccaggctgaaaacaggagaaaaagtgatagtttatgtgctggaatgggggcacccagcatcttcccacatcttcaccctgatttcacaatgaaaatccaatgcgagtaaagaatcctatgtacaaaaactcaattttcagaaatgtttctgcatgataaccttaacacccacctggactgtgcatttgtggaaggcttgtaaatcacagccttaacagcagaaggctgaaagggactggagaaaacatttaaaatcaccagatatttacaagctcttcttcatagtccctgagaacaaaatccctgtttccctcctgtagttctcaaaacctagaaaggctcataatccgatctcttttctcaaaatatcatgcaaaatgccccagggatctgtactttataatgctattaatttccctctggtgtcagaggtaccagcatagaatgatttaaaaaaaaaatcaacttaacacctaccccacattaggcaaacctttccatttctgtgtaagtgttcattttgaaggaatttcagctctggcaatagaaatgaatttgtgaagagttaagggatacatcagaatattctggcacgatgggtacagttgagcatttcctttattatagtagtgacagtttcaataccaaaacaaaatccaagccacaaaacaaaatttttctcgtaacaaataggggaaagaaaattattgcacatagctcacttacaatgcactgaatgtgtcaactcttcacacctctaaaaaggtacacagaggtaggacaggaagacacagttcaaaagaacagcacccaactcagtgcctactatggagcagatcctccctcatgtttattgaaccaaaggaacatagactctaacctcaaggaggttactgtgtacttaaggaggacacacaaacttgcaatccatgtaggtcaaagcaataatcagaaagaggctgggcatggtagctcacgcctgtaatcccagtactttgggaagccaaggcaggcagatcgcctgaggtcaggagttcgagaccagcatggccaacgtggtgaaaccccatctctactaaaaatacaaaaatcagccgagcatgttggcgggcacctgtaatctcagctacttgggaggctgaggcagtaagaattgcttgaacctgggaggcggaggttgcagtgagccgagaacacgccattgcactgcagcctgggcaacaagagtgaaactccgtctcaaaatgaataataataataagaagaagaattacccagaaagtacagaagccaagagttgtctccaagttgttctccaaatcagatataaaattaacagttaaaagtcaatcagcaattcctaagcagagactgttacacggccaacactctgccagaccccagggggttgcaagagaggaagaaagagctagtgtggatctgggcgctgcctccaggagctggctctggactataataagagaggctacagaagacatatgataggataaattaagaaagtctgcagtcatgccaagaaaggggataccaatattgtttcaaaatttaaaaagcagaacatcaaagaacagggaggggctctggaaggctggacacaatttggaaaggaaatgaggttaggaactttctagctgggaagcgcagagtgggcagagtctggaggcaagtacacagaggcttatgttgtggagtccacaaggcgaaagaaggcagggaggagtttacaaccagacatttgggtataatgatgaaaccaggcagaatggtttggacttcacacaatgggtggcttgtttccaactctggttgtactataaaatcaacctggagttttcaagctacagatgtcagctcccctccacaacctacagaaacagatttgccagggcaggggtatggacactgtgttttaaagcctcacacgtgatgctgcagcagcttagccagcatggagcaggtcagcattaagtacccactgtcttcggcagggtaacggaggcattttggaagggtaacttggcatcagcaagcagaattgatttaagtggggagatgggacaccaacatccagctgttgggctctggacataatccagatgtgacacagggcaggagaccagagagcagacagagaaacttggaagaaggaaggaatctgcaggtaaccctccagaatgaggctgcccatgtctgttcaatatcaagtcagtcaatcagaaacccatgatgagcggccacatgaattttgcattgagtcagccttaaatttggcatgtcagttattaatcatgactcagtatgaatcaaatccatatgggagctatatctgtacttaatttgcttttatcaagaagccttcataatataccagctttaaataattttacagaattaaacccaacggctcaaaattataatcaattacattcagcttcaattacagttattaattaacgtagatgggcttgaatgacctgactcttcttagctacgcctacccagtgataatgatgggcaggagcttggcttacaatctccaaactaggaaaaagtacttttgcttaaataagaaaaaaaaaaaatctaccatatgacccagtcattcctctccttgttccccaagagaaatgaaaacatacgtccacacaaagacttgcacaagaatgttcacagcagctttattcacagtagccccaaactggaaataacccaaatgtccatcaacaggagaatgaataaacacattgtagtatatttatgaaatgaaatactccttagcaataaaagggaacaaactactatcatgccgacattggatgaatctcaaaatcattacacggagtgaaagaagacaaacaacaaaaactatatggatactacacgattccttttaagcacaagggtatgcaaaactactctgtggttagaagtcattagttggtggctgggagggagcctgacttagggactaggagctctttcagggatgttagaaatgttctctatctcagctggacatggtggctcatgcctgtaattccagcaatttgggaggccgaggcaggtggatcacttgaggccaggagttcaagaccagcctggccaatgtggtaaaacctcacctctacaaaaaatacaaaaattagctggggatggtggtgggtacctgtaatcccagctactcaggaggaggctgaggcaggagaatcacttgaacctgggaggtggaggttgcagtgagccaaaatcacgccactgcactccagcctgggtgatagagcaagactctgtctcagaaaaaaaaaaaaaaaaaagaaaagaaatgttctctcattttgggtggtggttatacagatacacaccactgaccaaactcactgggctgacactttaagatctgggcatattgtatatgtattagatctggtttttaagtctcaaaaaggctacctgctcccccaattctgatgagccacatttgctacacagacagcatgttgggtatccaggttctggggtctatcctaaaatggcctctctggggtagccttgggtacagtcactaagtacctgacaaggcccaggcccattctcaaactctaagtaccagcagtgttaaaccagcatggaagtcatacccaaagggacctcccagcatccattctcagtgactgtaggtcccccaggtgaagtcctagacagtaataagttccatacagcaaggcaaccatccaagacatacctgggtttcaaatttattgaccagtcacctaattctacctccagtgccatgaaaacagagttaaaaaaaaaaaaaaaaaaaaaaaaaagcctccatgcccagtcctgctccaaaactaagctcctatatttcttttttttccaagtgcaactcagctcagccaacatttactaagcaactaccatgagtgagatgcccagctggactggagctcccattggcaatgatctcagctacacctaatgtaagactgctgtgctccagtctaataacgcttaggcttttttgtttgagttcaatgttcctcttctacaaacccattactctgaataatagaaatggcaagtatactcattactttggtcctttcaaggcagatccagaccagccagatgagaaagactcccagaaaccttcagtttgccaaaattgttaactccatgcagacttaaaaaacaacagcaacaacaaaaaaacacagagtgatgtggggcatccttattaaaccttttcaccagctggtcatcaagagagtgagaacatgttgccccaagctgcctcccgtggcactcagccaccaacccatcagcactctctcagctcaggtctgttgatgggcatcgcaccagctgctcaagcctccccaaccccagcatcaccactcactcacactgatccaatctgttccagatctagctgctaagaaagcagcccctcctatgtttgaaggagaagagaagactcggcagtctggctccactgatacaaaacgcaaagatctataagagaggagtttctcccccttcactcatctccctcaagatggagatgacaaaccacccacctgctagcttcatgcctcttttcttggctcaaacgagccatgaggcttggaggcagatcttcaaggtcaagggaaaagaaagatgctcctccttgttctaaatagtattacatttcattccaccactcgtgaaaatacaggttctgaaagtgtattctgtcctaattcaccagagggatgcagcagtctcccatgcgtatggtggccatgattcctgggagatggaaggcaggaggtaaggagtgatggggcagaatcccaaaggagaactggatgtcctacgaaaaagccccctcctaggactgcccgatatagcaaataaaaatacaggatgaacagttacatgataatttcagataaagaataaatacttgttttagtataagcatgtccctaatactacatgtttttcctggctatactacccccaccagtaattatcgtcatcttctctctctgtctctgtctctctttctctctctaaggaaggtaatacaggcctagcacagtgactcacacccccagcacttcgggaggtcgaagtgggcagatcccttgagcccaggagttccagaccagcctgggcaacatggcaaaaccccatctccactaaaaggcaaaagttagccgggcgtggtggcgcatgtccatagtcccagctacttgggaggctgaagtgggggcatcgcttgagcccgggcggttgaggctgcagtgagctgtaatctcatcactgcactccagcctgagcaacagagtgtgacccagtctcaaaaagacaaaaacaaaaaataaaaaacgaaaggtaatgtagcctagtagaaagaagaaccaccttcttctttttttattttatttatttttttttttttttgagacggagtctcgctctgttgcccaggctggagtgcagtggcaccatctcggctcactgcaggctccacctcccaggttcacaccattctcccgcctcagcctcccgagtagctgggactacaggctcccgccaccacgcccggctaattttttgtgtttttagcacagatggggttgcaccgtgttagccaggatggtctcgatctcctgacctcgtgatccgcccgcctcggcctcccaaagtgctgggattacaggcgtgagccaccgcgcccggcaagaagaaccaccttctgtcagtcagactacctggattcaaatccaagctccaccattcaccagctgggggatgttgggtaagagattaacctctctggagctactatttattcctatgtaaaatggaaataataatagaaatagtaacactcgtaaataaaataacatttacatacagagaaactttcttaatcctcctaacactaagagttaggtattactgttattcctatttctcatatggggaaacagaggctggagaggttaaataattgaacaaggtcacagaattagtaagcagcagagccaagattcaggcccagccagtgtggcacttaaaaaaataaaaataaaaataaataggctgggcgaggtagcgcacatctgtaatcccagcactttggtaggctgaagcgggcagatcacttgaggtcaggagtttgagaccagcctggccaacatggtgaaaccccgtctctactaaaaatacaaaaattagctgggcgtggtggcatgtgcctgtaatcccagctactcaggaggctgaggcaggagaatcgcttgaacccaggaggcagaggttgcagtgaggcaagatcgtgccactgcactccaatctggcgacagagcaagactccatctcaaaaaaaaaaaaaaaaaaaaaaaaatatatatatatatatatatatatatatatatatatcatgtatagttaccctgtgccaacctttacatttagattcttttaatttcagcttttagtttggatatgagggtacaggtacagctttgttacatgggtatactgcacccaggtagtgaccacagcacccaatagtacttttccaaaccacatccccctccttctctcccctccttagagtcttcagtgcttctttttcccatctttatgtccatgtgtgctcaatgcttagctcccatttataagtgagaacaggcggtatttggttttctgtttctgtgttaattcgcttaggataatggcctccagctccatccatgttgctagaaagtacatgatcccattcttttttatgactgcatagtattccatggtgcacatgtaccacattttctccacccagtccaccacggatgggcacctaggttgactgcatgtctttgctgttgtgaataacgctgtgatgaacacatgagtgcctgtgtctttttaatataatcatctattttcatttgggtgtatacccagtaatgggattgctgggtcaaacggtagctctgttttaagctctttgagaaattgccaaactgctttccacagtggctgaactaattctagccctgcttgtgactataacaccatcctacctcctgaggtggagcttatctcctagggtggtggtaaggattaaatgagattatgtgtgccaaattctcagcacaaaaactggcctacaagcggatactacgtatgtttattatgtctctattcttactattattgcagccaatgacttgagaaaaggggttgaatcaaacccctatgatctaaatgctagagttcctggggaatttaagcccaatttacccatcctgaacatggtagatacaggtgtctgtgaatagataataacgcagatgtgctgcgtgaccagatggatacacacacacaacaaatgacaaaggggtgtcattcccagcagcccaggggtccctcggcgatgctgtaagtttcagtccaattcaatgctatgtataagtgagctgctatttgtacacaggtctgtagacaaagaactgtgccacccaactgcgagagtgagtcggcaagtagctgggattccagacagccaggagctcaaagtttcaagcagggcaggatctggcagaggatatatcataaggccaaaggcgctacagcactccaagagggtccagagagggactgggggcaggggcttcaactagatgcatccaggcaaggctgcacagagcgctatgcgaaaggatgcaggaaaggctgagaagcaggttagggttgggaccaggagcagctgggcggatgcgccttccagggcaggagcagctgggcggacgcgccttccaggagcagcagggcaggtttagggaacagaagaggtcaaggcagggcacaggtatatgtgaacatgtcctgggaggaagcctggaaaggggatggaaatatgccaaggagagtcaagaaccctgtgccaagatgcttacagcttattcagtaagaactaaggaaccaaggaaaacttcggggtaggggcagttaaagaatctcaaatatgatttaggaagatgatgctgagggcagcattaataaattctgcaatatttttcaagtgcctactctctgccgtgcactagggattgtaatgaacaagacaggcaaattccccgcctgagaggggcttccactccagtaagagcagactggccataaacaagaaagcaaacagacaagaaactcaagagaacgaggaatgacatgaaggaaatgaaatgaggtcccaggcacagtggctcacgcctataatcccagcacttcagcaggctgaggcaggcagatcacttgagtccaggactttgagaccagcttggccaacatggtgaaaccccatccctactaaaaatacaaaaattagccgggcggagtggcacgtctgtaatcccagctactcaggaggctgaggcacgagaatcacttgaacccgggaagaagaggttgcagtgagctgagattgcaccactgcactccagcttgggcaacagagtgagactgtctctatttaaaagcaaacaaacaaacaaacatgtccgggggtggagagtaacagtgtggactccatttgacttgggtagtcagggaaggcttctctgaggaggtgacatttgagctgagccctgaatggtgagaaggagccatatacaattctaaatagaaggcatatcaaattcttaaggtcagaacaagtttggtctgtttgtggcaaaaaaaaaaaaaaaaaaaagaccttggcagaagcagaatgaccaaagcaggaagggttatcagcggggaggagagtgggtcctcatgggccatgaggcagttaggatcttataggagcagggagccatgtgaactgactttttttttttttttttttgagacacagtttcactctgtcgcccaggctggagtgcagtggctcaatcttggctcactgcaacctctgcctcccgagttcaagtagttctcatgcctcagcctcccaagtagctgggactgcaggcacgcaccaccacacccagcgaatttttatattttttactagagacagggtttcaccatgttggccaggctggtcttgaactcttgacctcaagtgatccgcccatctcggcctcccaaagtgctgggattacaggcgtgagccaccatgcctggcctgacttgcatttttaaagctctcttctggggatgggggaggtgaaagggaagggatggagtgggcaagagcagagagaccagcagaaaggccccttgaggggcatggaccagtgtcatcagtgcaggtgaggaaagatgatccaattcgggatgtattttggagggagggattacagggcttgtcaatggaagaataaggcaagatccagtaaaagagaatgtattggtttcctggagctgctataacaaaagactgcaaactgagtggcttataacaacagaaattcattctctcacggttctagaagttagaaatgcaaaatcaaggtgtcagctgggccacgctccctctaaaggctcttgggaagaaagcttccctgcctctagtggctgccagaagccctcggtgttccttgacttgtggatacatcactccagtcacccggccaccctcacctgtctgtttgtctgtgtccctcttcttataaggacaccagtcctaatgtggtatgacctcatcttaacttgattaaatttccatgacagtaacttgtttatatccacaaagaccccatttccgagccctaaaaagacctgtgaaggtcacattcacaggttctgtgcagacaggaatttgcagggtgaggacattttccaacccaaggcagacaggaatccagatgactcaggtttggggactgtgcaacttggtagaaggtggcagccttgactgagaagagacacagtgaaggaggacaggttaggaggtgaggatggaataggaagtgagggggagccgtcaagagttcaggccagtcgccgtggttcaggcctgtaatcccggcactttgggaggccgaggcgggcggatcacctgaggtcaggagttcgagaccagcccggccaacatggtgaaaccctgtgtctacaaaaaatacaaaaattagccaggtgtggtggcatgtgcctataatcccaactactcaggtggctgagaccaaagaatcgcttgaacccaggaagtggaggttgcagtcagctgagatctcgccactgtactgcagcctgggtgacaaagcgagattccatctcaaaagcaaaaagcaaaaagtttgttggtgccagagggaatgtcgaaactcatctgtaatggaagaaaaatcaaagaaaatgtatcatcaggcttaggacactgattcagacccgtgtcacctctatgggcctcagttttgtcagctgtaaaattggaataaccatccccagctccatcaagtggtcgtgaagacaaaatgagctcatctgtgttctaggcactcaacatgttggctatttctaatacaaggtgccccgttttttaccgagtgttaagtgcaagccccccagtgttgctgacagagaccaaatcaaccccagaaaaaaaaaagaagaaagcctctcagagggaatctggagaatccagggggacaacatttataacaagaaaaacctctcattattatcagacagataaggatgcatgaaataaacccataaagacaggatgctagaggggaaaaaaaaaacaggaagactaagagagttttcaaaacctaaaactgcaaaaacaaccgaaaacactttgctctttttatggaatcaatgaaattttccaccacgcagaacaaagcagcaaacagatgataaaataaagagcgaaaagagaggagagtgagagattaagtccaggaaggccagtagccaactaataagactaataaagagaggacagaggaccagccaggggaactattaaaggcatataaaataacatttaccagaactcagggacactggcttccaaactgagaaactgcagaacacatttatttagaaatgtgggagaaaatgtctcaaaaagcagacaaaagtggttactactggaaaagagggcaggaccatggaaggtgaggtagagaattagtggttttattcctgcccaagctgcagtcacagtggcacaatcttggctcactgcaacctccacctcccgggttcaagcaattctcctgcctctgcctcccgagtagctggaattacaggagcgtgccatcatgcctggctaatttttgcatttttagtagagacaaggtttcaccatgttggccaggctggtctcgaactcctgacctcaggtgatcagcctgcctcagcctcccaaagtgctgggattataggcatgagccactgagcctggccaacctaatgtttaaaaacatgttctttcacttaatgtattctaatctttttcttgttatgttggtggttacatattactccatcacatgagctgagatgagttcactccagtgagacggaggctacagtgagccaagattgtgccaatgcattccagcctgggcaacagagcgcgaccccatctcaaacaaaacaacaacagaaacaaccattatgtatggtatgagcccatttgattttcttttttttttttaattatatatgaagaaaaaacgatagaagattgatactactgagaagaaagtttataggagtctgtatggagaagttaatcaactagggataaaagaggtaagtagtaaccctgagggccacatactagaggaaaactgatacccacagtcgcagacttacatcaaacccaaacagctcatgtgtctcccacccattttatatgaatagtcatcaacatgtattgatgagcatttgctatgtgtcaattactgtgttaaatgcttgaaatatacttactcatttcatctgtacagcaatcctatacaggagacagtactatcatctccattttacaaatggggaaactcaggcttacaaagtctagctaactagcccgagctcccacaactagtgattagcgaaaccaggatcaaacccaagcaaggtgaccccaggattctttataatgccagaatacatgtccactaataaaaaagggctccagcccatggtgccgaccgccccctgccctgagctcaccccacgcagctgatggtttgagacatttcctggcatgactgcatcctgagatgttcatcataattaaaacgtggggaaattttcaaactgcttcagagatgtaatgagtttacattcaattagtttcttccttcattgggagaatcagaaagactgatttccgtatagactcagcagggaggatttcttgctgcctattttgagatttcattctgatgttccagtaatataaatcagcacacatggggggtctggaaaaatcaagctgagctgagaggcagccaaccccaaagaaaatctctaatgcgggccaggtgtggtggctcatgcctgtaatcccagcactttgggaggccgaggtgggtggaccacacagtccggagttcgagaccagcctgaccacatggtgaaaccccgtgtctactaaaaatacaaaaattagctgggtttggtagcgcatgcctgtagtcccagctactcaggaggctgaggcaggagaatctcttgaacccgggaggcggaggttgcagtgagccaagatcgccactgcactccagcctgggagctggaccaagactccatctcgaaaaaaacaaaaaaacaaaaaaaaaaactctaatgcacacgccacatttattcaacattcactttaaaaatatttttggatgccaactatgttctaggccctgtaataaggaccaaggctcaacagtgaaagagaccgcctctgccctcaaggtgcttctagtttggggaggaaagaagacaaacaattagaatccagagacagtgggaggcccaggcaggtggatcacttgaggtcaggagttcgaaactggcctggccaacatggtgaaaccccatctctactaaaaacacaaaaattagtcaggtatggtggcatgtgcctataatcccaactactcaggaggctgaggcaagagaatcgcttgaacctgagaggcacaggttgcagtgagccaagatcgtgccattgcactccagcctgggtgacagagcaagattccgtctcaaaaaaaaaaaaaaaaagaatttagagacaagtgctggggagagctgcagatgcttatcaaggggcttatcaatcccatcgtggagggggctcagaaattaagaagcaaaaaaatctccttaagaaacaaagactcgatgacaaggatctggaagggatcagggtccagaagagaagggcagagcaagtgaaccccaagggctttgggagccaggtccatgatgaggtcatatgctggagtaaatgacaagcaaactctcccttcaccagctgtcaacaatgcacctcccaatccaacctgcatgatgccaggagtgtccctgtcccaagccagttggctgctggctgtctctggaagagaagggctcttctggggagtcgaggggggatatgaaatgaattcccgttagagtgctccacattcattcatgcgtgacattggggtggggcagaggggagttcatgcacatatttgggcacattaaggctctcaaaggaagcagaggtccacaggaggtaggacctgtttaagcctgaggatgtctgcacaattgagtctcacccggcaactgcaacctggcctgggacatagactaactgaaagcctagcttaggagtacacttttttttcttttttttttttagagagggtctcactcagttgcccaggctggagtgcagtggtacaatcacagctcactgcagcctcaacctcccgggctcaagcaatcctctcacctcaccctcccgattagctaggacgacaggcacattgccaccatggctggataatttgtgtatgtagaaatgagggaaggcgggtagggggcgaggggcaggggtggaggggagcggagacctccctatgttgcccaggttggtcttgaactcctgggctcaaacgattctcctgcctcaacctctgaaagtgctgggattagtaagccaccaaatcttaatcaatcatagcagctgagcgtcagtcaatcataggcagccagctggttcaaataaggcaaaacaccaggctgtaaccaattaggctatctctgtgcagcccttccatcttctgtccataaatgtcccctgaccacgttgcagccctgggcttctcaagccattccggttctgtgggctgcctgatttttgaatcgtaaataaaggtcaattaagatctttaaatttgctgtaattgtctttctgatacttttggtgcccactatggggcacagaggacactgctggcaactcccaaggcccctggagggcacaggagaggcaccgctggccccgtgaggtcccatcttccccacagagccccgagggtggtgaatgcctctcagattggactctggttttttgtttgtttgtttttttttgagacggagtctcgctctgtcacccaggctggagtacagtggaataatcttggctcaatgtaacctccacctccctggttcaagcaattctcctgcctcagcctcccgagtagctgggactataggcgccatccaccatgcctagctaatttttgtatttttagtggagacggggtttcaccatgttggccaggctggtctggaactcctgacctcaagtgatccacccgcctcggcctcccaaaatgctgagtttacaggcatgagccaccgcacccggctggactctgctctttttacattgagtccctgatctttttttggcttttgcatccaggattagattgtgctggatgagagcacgtgagcttctgggatctgtggtggctggcaagtcactggcaaaagtcaaagtcatgacaaagacgggactgagtcctgtagggaggcctcaggtgcctgcctgggtcaaacaagctggcttggatctggtaggtggggaaggttacgagaagacagggagtcatgggttcacctggatccaaggggtctccatgaatctatcctcctatctactcctctaactggaactcctgccaatttcatgtacaagaactatgaacccagaacctgtgcttttctagagaaagagagaactttaccaagaagacttacagtggccacagtggggaagctttaaactatatttaatttttatttgtgaggcacattagaaaaggaagaatcaaaacaccccaaaaaacaatgggatgcattttttttcttttcctgagacacagtcttgctctgtcaccaaggctggagtgcagcggtatgatttcaactcactgcaacctctgcctcctgagctcaattgatcctccctgcctcagcctcctgagtacaggcacctgcaaccatgcccagttaattttttgtgggagatgtatatacatgtatatcaagatggggtttcgccatgttgtccaggctggtcttgaactcctgggctcaagccacgcacccgccttgtcctcccaaagtgctgggattacagcaggggccgctgcacctggccaggatgcacttttaactggtttgcaggggcatctaaatgattaaatgaatcaaacattgcctcttttaatagattctttataaaaggcaaatagaaagcttaagtgactcattgatgagaaaaaatattttatgttgactgacaattctgaccgcaccttttctctatctttctatcctcctctgcctagtctgaatttactttttctcttagtaaccttccaatcttaaaaacaaaaacaaataaaagtgatttataaaagttaagctctcagatcaacgaggtctgcttctttagccacttttatggtttggtgaaaatcttaaattcagccctgttcataatgggtttccacctgaattcagtaatctagttagaaaatgcaggctgaggccaggcgcggtggctcacgcctgtaatcctagcactttgggaggccgaggcgggcagatcacttgaggtcaggagtacgagaccagcctggcgaacatggtgaaaccctgtctctacaaaaatacgaaaattagccgggaacattggtaggtgcctgtagtcccagctacttgggaggctgacgcacaagaatcgcttgaaccccagagatggaggttgcagtgagccaagatcgtgccactgcactccagcctgggggacagagcaagactctatctccaaaaaaagaaaacacaggctggcttgggaagctgcctatctttagttattttagttatttcgttttagactcttttttttttttttttttgtaaaagaaatttacttctgtgggaaaagtctccatttgtggggtgtgtccctctttgcaccctaaatcactagaaactttcaaaatggagaaggtcaagacttaactttgtttcacaggccttgcctttcaccattttgtcttcaccaggcttgcgtgtttgtttgtcttggcaaataatactattttggcctgaaatctggttatcaggctagctgacaatccctgggggcaataatgagtaatcgaagtgtcctctgatttaacccccttgctagaatgaaaacagtcgggggataaagaaaatatccgcagagtaaatgcggaaaagatagataggtccttggaagaatggatgatgggccagctggggtggccttctgatctcgtctcctgtgataggagttaatcttggccgggtgcagtggctgacatatgtaaccccagcacttttgcaggcccagacgggcagatcacctgaggtcaggagtttgagaccagcctggccaacatggcgaaaccccctctctactaaaaatacaacaattagccaggcatggtagcaggcacctgtaataccagctcctagggagaaagaggcaagagaattgcttgaacctgggaggtggaggttgcagtgagtcgagatcgcaccactgcactccagcctggctgacagagcgaaactctgtctcaaaaaaataaaaaagggttaatcttcagaagactgacgcagttgagttccttttgtaggatctgtcttttggcagatgaaagagaactcaggaggccttgccctgtgttttgccttcaactcaaagtaattaatataccaaaaatgtgactaccaaagcaacacattttggggtggcattccctgaatgctttcaatggctagttttgtttagtgagcaattaaataataactgttaaaaaaaaaagaataaattaggtgaatatggacagcataaaagtttataaatgaatttgtcattgtttcaaaaatcttttgcagcaatttggaattttaaagtaatagatatttataaaatgtctgagtcatttcttagttaaaatactagaacattaactgctaaacataagtttcaagtataaatactttggcatcttggttttgtacaatatagagaagctgaatatatttgggtttgttcataaacatgaaaacattgttctaggaggaagcacatatttctagaaattacaaatgtatattcatgaaatgttagtatataacagtttaaaattgttttacttcttatgttttcactagaaattgaggttagtaacagtttaaaattctaatcaatataagctagtgaaaactggaaataagcccaggcatagtggctcacgcctgtaatcccagcactttggggaggctgaggcaggcagatcacctgaggtcaggagttcgagaccagcctgaccaacacggtgaacccctgtctccacaaaaaatacaaaaattagccgggcatgggggcggctgccacctcaggaggctgagacaggagaatcacttgaacctgggaagctgaggttacagtaagccgagatcgcgccattgcactccagcctgggcgacaagactgaaactgtctccaaaaaaaaaaaaaaactggaaataatatgggaaacaactccatatgcaaggaaaaaaaagatatgtttttgttaagtgaagctatgaggtatgaaatatgtgtctttgttaaggaaaaaaagagtaattttcaccctaacgtagaatgacaggttgccccaaaatgagaaagagggaaggtatagataggataaataaaaaactgatggaatataagaaggttgtaggaggtttgtggacggtgaatcatgtgaaagaaattttattgtgatcagcagggcgtggtgactcacccctgtaatcccagcactttgggaggctgaggcaggtggatcacctgaggtcaggagttcaagaccagcctggccaacatggtgaaacctgtctgtactaaaaatacaaaaatcggccaagcatggtggtgggtgcctgtaatcccagctacctgggaggctaaggcaggagaattcgcctgaagccgggaggcagaagttgcagtgagccgagatcacgccactgcactccagcctgggcaacaagaatgaaactccatctcaaaaaaaaaaaaaaaaaaaagaaagaaaaaagaaaaaaaaagaaaacaaggtaaaaaaaaaaaagttggggggtttctttaccttttaggaaactggcaaaggaaatgaagactgcgttctaccaaaataactttttgtccttcacgttgtctttatcaggtttttgataactatagaaaactattaaagagctaaggtttttcctccaaatatgttgctttttatattcacctttgaagtctttatcactctggttaaattaatgactattatttcatagttacttgtgatcccattttgatgaaatgttttaaaccttggtgatatttaaaccaaaatcaaactctaaatttagtctttctgaccaagaattaactttgggattctcttgctgggccctgagaaagcctcaaaggatacatctctcaccttgtaaaggggagatattatacgaattaggcttatttagtatactaaattatatgggaagtactgtcaaataataagtaatgctgaaccttctttgaattttactcatatgtgttctagaaaattgtttacaatttttagaaatttgatacgtgatcagccataatttcagttattatgttaaatggttgtattccacagaaacaactaaatttccttgtcaattgtgtcattattgaatgaaatttcaacagctctttaaccatggacattttaagtcctgtcactcacagacggttgtttgctcggtactttcctaagcaactataagcctatatagttttgtcttcaaggaggctcacggaaaagattctgacaagtacaggtttgtgattactttaagatcgtatcattaaactgggtaagaattctcagaactcaccgagcgtggtggctcatgcctgtaatcccagcactttgggaggccaaggcaggcagatcccaaggtcaggagttcgagaccaacctggccaacatggtgaaaccccgtctctactgaaaatacaaaaattagccgggagtggtagcaggtacctgtagtcccagctactcaggagactgaggccagagaaccgtttcaacccagaaggcagaggttgcagtgagctgagattgcaccactgcactccagcttgggcaacagggcaagactctgtctcaaggaaaaaaaaattctcagaactcgtatgaagaaactcactggttcataaaactgttaacccaccatcaaaagaacaagaattacttaaatgctaagtcagattttcatgctaagtcagttgattgtgaaattgttaagatatagaagctgaatgaactccctaagatttatccaagtcaaatcacctatgatgacctattcattggacagggttatgcatcttaattggagaaataaaacttgtacttgaaaggatgtaaattcaacattaagcgtagactcatagagggcttagacaactacttggtcttttctgagtccttaaagcttccattattaaaagttctgtgcaggctgggcaagtggctcatgcctacaatctcagcactttgggaggccaaggcgagtgaattgcttctgctcaggagttcaagactagcctaggcaacatggtgaaaccccatctctacaaaaaaacacgaaaattagccgggtgtagtggcccaagcctgtggtcccagctactcagggggctaaggtgggaggatcacttgagaccaagaggtcaatgctgcagtgacctcgtgtgatcacgtcactgcactccagcctgggtgacagactgaaaccctgcctcaaaacaaaacaaaaaaaatcctctgttccatgactcttcataccacagacaaaatgaaacaaattatggaaaaataatggtgtggcgactgttctagaattactaggatggtttgtaaccagtgagtgcttagtttgtcaaactcataatcctggaaagacaatcaaaacttcagatgaggccgggcgcagtagttcatacctgtaatcccagcactttgggaggcttaggcaggcagatcacatgagctcacaagttcgagaccaccctgggcaacatagcaaaaccccatctctataaaaaaaaatacaaaaattgggtgtagtgatgcatgcctgtagtcccagctacttgggaggcagaggtaggaggatggcttccacttgggaggcagaggaggttacagtgagctaagattgcaccactgcactctagcctgggtgatagtgccagagcttgtctcaaaaaaaaaaaaaaaaactttaggtgatacacttctgctacctgataggccatttgaacatctacagagggatttcattaaattgccaccttcaataggatatcagtatgtcttgcaacagtttgcatgtttcctggttggatagaaactttccatgtagaaaagctaatgctatgacagtagcaaggaagttattacaaaatttatttcctttatggcagtggtctccaacctttttggcaccagggactggtttcgtggaagacagtttttccacggattgggggtgggggatggttttgggatgacactgttccacctcaaatcatcaggcgttagagtctcataaggagaccgtaacctagatcccttgcacgtgcagttcaccataggagttgtgctcctgtgagaatctaattctgctgctgatctgacaggaggagttcaggaggtaatgagagcaatggagagtggctgcaaatacagatgaagctttgctcactcacccgccactcacctcctgctgtgtggcccagttcctaacaggccacagaccagtaagtcttgggggcctgctgggggttgggggcccctgcttgaggagacatccctgtcaaaatctctagtgacacaggaatccatttggacaaattataaaagagttaaaatgttagaagcacaaggtactagcattgtctctatcaccctcagtcttttggaaagataaaaatgacaaaaggcatttttaaaaatgaatttgacgaaggtaactgaatcaattggattgacttggccaaaggtactaccgttagcactaatggcaatcagatccattctcactgggatatacagattgaccccttatgaaataattactggaaggcctacgctgctaatagaacctcatgtatctttcactcttataaactctaatataattaaatgctgcaagactttaacgaattgtgtcaaaatgtattttcagagggtaaaagaagcttttcaaggccaggtgcagtggcgcgtgcctgtaatcccagctactctaaaggctgaggcaggagaatcacttgaacccgggaggcagaggttgcaatgagccgagatcgtgtcactgcactccagcctgggtaacagagcaaggctcatctcaaaaaaaaaattaaaattaaaattaaaaataaaacctatggccacaagattattgcaagggtcagatgaggtaacggatgagaaagtgcttcaaaaagtataaagcaataaaccaatgtcacataataatatttggggctcctgagcccataagatgcaagtgttcgctgccatcagcccatggatactctcccccacacagaaatcttcatgcataattacaaagtgttcagcaaattcacgtctgtaatctgtttaaagtttatgcacaggcaatgaccgtgtgtcccttcctccatcttaaatacaatactaatctggtttccccttgtttatgcatttaacaggtatctaatttttccacactcctggagaactaactcatttagctccagggctgtcttggttgatttctctacaagaagaccagcgcctcagaaattgacagaggtttccaaagaaatgctacagcaaaaaaaaaaggaaataaaaaaaagaaagaaaacctacgcactggtcggtgtgaagcctccccttcatctgtgtgtcagacacacaattctcaccatcgggcctgatggttccatttggtttgctgttcagtgagtctgcagaaaccaagcactgtggctcatggccctgagccaaagtcagatgtgggattagaagccagggcacagtggcagcaaagatcagcttccaccaacaagctattaaaaaagtttctctccctggtattttgttctttcttttctccggagggcacagaagcattaaacagtcatgactgaatttatcctcccaccatttgcacaaaatgggagggaaaggatttcagtctctgtggagccttgagatgcctggaggttaaaggacttgtggctaatcctgaggactctaagcagctcagctagaaatacaacctagggctccagactccccatctgtgctgaaacactctctttattactgtgtaggatggagttctgcttcctggcctcagctgcccagagaggaggtcccccctctaaggaaagcagcagtattgcaaaggtgctcacagggactcctaaggtcatattccttagggtgggagccaccagggaagggaagtggaatgaggccaagaaaactccttgatccatccggcatccaaccctgtagccagcaaacctctccaggccctgggaaaagcagagagcaaggattctcagcccataatgtcagctcctctggtctccgtgcttctcttctcaccatacttggcagaggggggataggggaaaaaacacagtttggcactgtatccccctactctgccccatacccctgcctgaggaacaccaagacagggcttcccctttctccctcctgctctcagtcaaagtgtctttatagccataaattaaatttataaaatgagacagagtctccccagcaaagggggaaagagattgattcctgattgtggaagagaattattattgggtccttaaaaaaacaaaaagaggccaggctcagtggctcacgtctgtaatcccagcactttgggaggctgaggctggcagatcacttgaggtcaggagttcgagaccagcctggccaaaatggtgaaacctcgtctctactaaaaatacaaaaattagttgggcgtggtggcaggcgcctgtgatcccagctactcgggaggctgaggcaggagaatcgcttgaacctgggaggcagaggttgcagtgagctgagatcgcaccactacattccagcctgggcaacagagcgagactccagctcaaaaaataaaataaaaataaaccaataaaggtaatacaagagcaggttaacaaaatcaagtcatgctgaagcttagaatataaaaaagttctctcttccctgcctcttccaattccacagcctggacacacctgttctcaggaggtcaggaatccttcccccgagcaaaaagattctgaagatattaagttactgtcagccatagaatgtcacctcacccaacagctaattcttgcttccagaataacacagcccttggactgagagtttagctcaaatcctttcctctcagcagatccagaacacctacaactgatctgggcccacaaaggttttacttctctgccgcttacaaacagagaacacattaggcttaactggggcttcaaattttttccaccaatgtttaagttagtaaactgaatagacacttagaaagccagcatttcttctcactggatgggagttggtgcccaaagggaggctcagaggcaggacggagaaaacaagacaaaggggaagcccagtgtcgggatcaagtgacagctgagaatggccacaatgaaggcacctggcaccaaaaaaggaatactgattctggaaggatggactgtgaacaggtgtcatctctccaaaggagaggtggtagacagcaaagcatggccatgatattttgtaagctccgcctactgagaactagagactagagaaacagactctccggtttccaccttcaccttcttggagctcttccactgccatgtaaagaagcctaggctacactactgaaccatgagcaaccacatggagaggcccaggcaaaaggcaacaaacaccaaggccccagacctgagtgaggcccttatactctccagtctagtggaactgccaaatgaccgcggcctcatgagtgaccccaggcaagaccagcagaagaagcacccagctgagcccagcaacctagaaccaggggaaataaattgttgtcttaagctactaagttttgaggtgttttctaaccatactccacatttacagtctgttaactacccaacatccattacacctccttggcaaaaacaccttaatttgcttttgaggaatcacttttccctccattattcatccttattatctttgttatttactctaatggtgggaggagggagaacaggacacatggcccaggcttggccattaatacactacatcccctggcaacatacattagtattcagggatgagcacacatcctgctcaagtttcatgggccaggagtaactggcctgtcatgggaaacagcctgaaagtggagccacacagggaaaagcaggaccaggagatggagaaaaaccaggtgctggtgacatcctttgatccacagagtctagcagtgcccagacaccagttctactcctggatattttaattgcatagaccaatacattttatttcttctttatgccagattgagttaggttttctatcattcatgatcccaaaagtcctagctaatacaaagagactaagggacttatttttatcgtatatcctttgtactacttgaatttcttaccaagttcatgtattacttcttcctttcaaatgaaactaaagaaagaaagaactcattttaaaagcaacatacaaaatatacaccaagaaggtaaatcaataacagaatgaagactaaaagttctctccgcactaggctgtgtggccacaagagtgctgagtgcctgctccagtttccgtctgccctctctttcagtaatagaatatcaacatttagctgggcaagctgctgcatagctaaaagaacatgtgtcgcagcattccttgcagctaccttaggtcatatgaataagttgtggccaatgaaatgtaagtggacctgctgtgcaggactttcagggaatctacctccctcctgccactttgtagcatggaaggcagatgtgatgacttgagctccagcaactaccttgggtcagaaagacaaaggctgccctcttgggcaaagcagtgagccaaaaaggagtctagatccctgctgactccatgaacctattttcccagccatggtctctagatttcttctacagaagaggggtctttcttgttttttgttttttcttttttttgagaactggcaatgaagacgcttatacagtcttagtctccttttcaaccttggaagcagatctgcagcaataatagtaacaagcaggagcaatgggggtactataatgaccatcttttatgatgactggcgtattaatacaaatcacatttttttgagtccattcatgctatggatgttttcttatgcataaacatagagtagacacgtactgaatagatcacatctgttaagtctcttgccacaagcatcacaacttttcagagctgtctcttctgtgaaaatccatttaatgtagcaagttgattttctttgtggttcatccccatgcctgagacttgcagtaatgtaaaaccagtttaccatcactgccaaaacactcagagagagttccaacttcttggtctggggaaggagcaaaggactgattcacataaataaacaactgttctgaggccacaagtttaagaaactttttgatgaagtcaatgagtccttggatggttcatgttcgctctactgcccacttctttgttttcataataggagtatctcccacagcctttagcaaaatgtcaatttttttcttggtgtcgccagcaggttcctctgttcccggagaaactgcagtggaagacgggggctccagagtggttgtttctggggagacctccgtaagtccttcccctccagtagcacttgagggaggaagctgcaacatggactgcggctcctccaccatcttgcttggagagactccggggtctttcttgttttagccactatgtttcaggtctcaattattctcagtcaaatctaatcctcatagatatggatcaccaaaagcagagaagcaggaaacatcaccaccagtacaactagctgtaggtgtctggttgccatggagaccaccccaacacatgcagattccaaagtacaaactcactcaaacaagacagacctgatgtaagtaagcctaagagacccctggcctcctcatttccggtagagtccccctcagtccataaggcagaacggtgatgccaaaccctttaacagccccagggcagttggccccagacacacagttcctgttgtaagcttgaacagctttgcttgactactttcacaatcaaaggactgccaagtcctctagactctccagcaggactgtctctcacacttcctatctcctatgcctctgtccaaagtcaaaacctcattattacctttcacctaagtgcaagaacctccatcctgtttctcaactgccagcctccccctgtgcacacgcatggccagtccatctgctaccaacagaatgtatttcttaaaagcacagctctgatcctgtccccttctcaaaaacgtctccagaaacttccccatcaacctagagaacagagcacaactcctttctaaggaactataggttgatcacgtacgggcctcaacctacctctctggcatcacctcccaaccaaacgaataactatgttgccaacagccctgtattttccactcttatgcttccaattttctgttccctctgcctgtaacgcatttccttcccctaccccgtcttccccactcccatccttacttgtcaaaactcaacctatccctcccacccaagctcatccatgaagaagtcctaattccccaactagaagtaacctccctgtcactgagtttccagcaccttttgttcattacgttcttaacaaccacatgctgacccgcctcataatgacaggcaaatgtgacttctctccccagccgaccttgagctccttgcagggagggattatatcttgcttctttgcctgctctcccacaatgccttacacatagtaagtgctcactaaatggttgagggcttggcctgaagacaattctctccctgctcccacattctgagcagctgttctccaaagaaagaaacaaatggttattctgcaaacagaacacgtttgggccaactctaaaattacacaggcccttgacaaagctttgattactggctcttctccccttttatgagcaagccactgctaaaaagcaataatatgcaatccaaccgcagcctctccacaaagcacttgtgttaataatctgtgtatggatttggtcttgacatgcaagggctaaaggacaaaacttaaccaatattaactttgatcctttgcactcagggtatctttcaaaagaattgatactcagtaagtgctttttcatgtggttggtactaagatgcataagaaaaatgatgtcagctactccctattatttaaattgcagcagaagacatttagatcagataagtttctaacaagctagctaaacactcaattaggttacaaaaaaaaagtataaagtcttgcttcacaaatatctttgggaacaatctctactcctaccatctgtctggattcaatgaagtattggcccgtctgatggcagagggctgcctgagatgactcccacaagtctctgccagcctgagatttttcagacatagtatgtgatccaacaggcactgtgcatcaagagagaattcaaactcaagctcaaactttccaagcaggaaagatcctgcctgccctctttcttttatgagagccaaggagccaggcccagaggacaggcccgagttcccagctgcaggctgaccagtatcccatgaccgactggaaaatgaacctgaaagtatgacaaatgcccccaacccaggctggtaacaagatcagcagtcttgagaaccaacactaatgtcaagtatgagccttccatagacagggctgcagctagacaccagaggtgacagcctcctcccaggcttccctcatccaagctccagggccccattctttatgtccagagctcttctgactgtgacctgaaccctaagcattaactcagttgaattcttagcctcaaagttacatggagcctttgaagggagtctgctttttccaaacaccagctcatccttcattaaaccatgatcccgattagaacaggggttcccggctttggctgcacatcacagtcacctggtgatatggtttggctgtgtccccacccaaaccttatcttcaattgtagcttccacaattcccacatgttgtgggagggacccggtgggaggtaattaaatcatgagggcgggcctttcccatgctcttctcatgatagtaagtctcatgagatctgatggttttataaaggagagtttccctgcacaagctctcttctcttgtctgccgccatgtcagacatgcctttcactttctgccatgattgtgaggcccctccaggcacgtggaattgtgagtccattacatctcttttgtaaattgcccagtctcccgtatgtctttatcagcagcatgaaaatgaactaatacacctagggagctctaaaaattactggtgccttatcctagggtccctccaccccccaacctcagagattctggggtagttaatccagggtatgttcaaggcattggggttttttaaagctctctaggtgattctaatgtgcagccagggtggagaaacaatgcaacagaatgaagagaacttccccaaagccagagaactctttggaagtgaaccatcaaggacatgaggccaagttagcttactctgctagactacagatgctagcgactgttacaaatttgagtgctgcttgagctagctttccctcacaatctcaaattgcacacttttggcttggccatctgtcttgaaacctgtttcctttgtgacaagaagaatggagcaaaagggcccagataactcatcacacttcacttgcaaagccagcccctgaagattcttcaaaggcaaaagttgagcaaaggaagagctgctgcagcacagagctcctaaatgaagagcaagccctgtttgggagggtccaccacaaagtggtgatgtggtgatcccctggaaatcagccagttgggaacactggacattccagagagcattcctccagcacagtggtcccgatggttcttgctcaagcagtccactgtcaccagacctcagaaaaccgtgtcataaacattgcatcaggggccagcagacttcttctctacagggccagatagtaaatattttaggctttggggccacagagtcctgttgaagctattcaactctgccactgtagtccaaaagcaatcacatgcaatatttctgcaaataggaatggctgtgttccaacaaatctttatttacaaaaacaggcagcaggccgaatttaaggcacccatgtactttgcccacctctccgctaaaacacaacttccttacacacacaggccatctcccatcacttcttcaaacccctggcactcggcacagtgactgcaatagagcaagttctcaataaatgctaaacaaacgaaagaacgaatgaataaaaaatgagccgactaccctaaaggaatatctattaaacatctaccttttcctatagagcaactaataagagtcactgcaacttcagagcacttacccctgactatttaaactgaatctctaggcccttattaaccttctgcccatcaatcacatatactcattcccgccctctccttcataggaacagggaaggatgcccccaaacaaagaggaagatcttcccgggggaatgctgtggccctatcaatacagaggcccaggcctgcagggaaacacagaagggtaggaggggaggcaggggcgccagatactcactcacgcagtcagagtatgaacgtggggaggaagggggaaagggatggggacagacagggactgtttgcagggctctgggcaggcctcagagccacaccaccccagatgctcaacagagcaacagcatacacgtgggctcatgcgtcaagacaaaggctgttacttcccatcacggcacagagaaggtgatgtgtatcacttcctcccccacactgtggataatgacattggaaatctgaagcatgaaaccgaaaagaaaaaatacaaaaataatcatcatcatccgtctccttcctgagtgttttgctaccctttcttcttccttccttccccactttgtgccaccccctcttcttgaagcaagactttgtcttcctcccagaggaatcgggagtcagggagcctcaagcccacaaaaaccactagtgtttgggggctgggagtgccaggccaacagtcaggcttgtctcccaaaatatgttcacggtctcctgtccgtgcctcatgtggtttgagaatgttcacctttgccaatgcacagcggttttcttgttggaaactgaccatctgaggtctttaaaaataaaatgctggctgggcgcagtggcccacgcctgtaatcccagcactttgggaggccaaggtgggtggatcacttgtggtcaggagttcaagaccagcctggccaacatggtgaaactccatctctactaaaaatacaaaaattagctggacgtggtggcaggcgtctgtaagcccagctactcgggaggccaaggcacaagaatttcttgaacccaggaggtggaggctgcagtgagccaagattgtgccactgcactccagcctgggtgacggagtgggactccaccccaaaaataaaataaaataaaatgccaactcctcatcacataaactctaagggtcccaataccccaattatgagagtgtggagtgccagtgtcttgtagcattgctatgcaggaagcaacacgtcagaaggcagtgggtgccccatagcacctgtgccatggacccggcaaccacgctgtgaataatggttagagagggaccctcccccatgtcctcttcaggcaccaggccacactgggcttgtcaaatggggcatctggggcaggtagctcaaggtcctaccaaaccaaccctgttacactgtctcacctctttgttgagtgcccacccagaaggcagccgtagccctaagatagacaaaaggcacctcccttgttattgcgtaccagtgcagaacaagcaaacctgcaaagaatagaaccttggaggccctggggctccccaactccctaaatccttaaaaagcaaatttaagagaggagcttcaccgtagacaactgtcccaaaacttccaaggtcaggcctaggaagtcaggcctgagtgatgctggggacggatctgctcttggtccaagcactctctggctctctcctttatccctgggaggtcaccatcccagggaggtcatctcagggtctttcatttctcccagcctcctaaagagaaaaaccatagctcagagtgacagcaatgatctttgcaggagcctcctcagagtccatgagcctattccttgcatatggtcttgtggtgctttggttgtggcccagcccatctcagtgtggtccaacacccctcacattccaattccataaaatatctccaagaaaacatatcaggcttccctacctctcaggcagtaagatggaaaaaaaaaaaaaggtagcagcaattattaatttctcaatccaggatctatagaggatttaattattgagaaatattaataattgagaaattattaatttctcaatccaggatctaaaagctaggatttccaaagaccctgaattcaatgactgctccctcccctggactttccctcaatcatatttactctagaataaacctttccaggggccctcctgaaatatccctgacttcatgctacaattattccccccaccccccgccccaagacagagtcttgctctgtcacccaggctggagtgcagtggtgcaatcttggctcactgcaacttccgcctcctgggttcaagcaattctcctgcctcagcctcccgagtagctgggattaaatgcgcccaccaccacgcccggctaattttttgtatttttagtagagacagggtttcaccatgttggccaggctggtctcgaactcctggcctcgtgatccacccacctcggcttcccaaagtgccgggattacaggtgtgagccaccgtacccagccatgctacaatttaagtccatttctttccatccagctctctttggaaatagagaacagctggtcactatcattcctccagactcaagccatcactggagagcatcattaacttccaacagtgagccagttatttggaaaaaacattatgcaccacttgctgcacaaaagcagacttagccaaaacctccttaataaaatcatgtctttcataagaaaccagctccctaagggatgaaataatagatattaaattgccttttcacgcctagaagtaagtttcttgattggtaagactgtctttctcttctgcagcttcatgatcctattattccttataagtgcttcttccttgatagaatatgcactgatacagagattcctagttggttcaagacttgccaaagagacacagcagacccacagcaaataaaattaaaatggtgatccccgatgtttcagccactccaaattcatccagatgtcttttgggacaatgactgccttctcactcacatgaaaaggatattcaactgcatgcttaattttaccactgaatcatatccctaagcaggtgaactaaaatccaactgaaacacttcacaattacaatgaaaagatgtttgccaacctgtgctgcaacttgtccctttaaacatgcagaaacaagaagctcttaatgaaccatccgttccaacgtcctcatttctcagcagagtcaactgaggcccaggaagaccaatgagcttgcccgaggtcactctgccaaatactggcagcccctgacatcttatctgggtttcatcctacctccgccattatctagcaattttcaattctaaataagacatttactctccccagacttgtttcttgtctgtaaacaaaggcagctggaccagacatcagctcagaggcattgtggtataagagtgtaaattctacagtcagactatgggttcaaatcctggatatgaggccgggcgcagtggctcacgcctataatctcagcactttgggaggccaaggtgggtggatcacctgaggtaaggagtttgagaccagcctggccaacatggcgaaactccatctctactaaaaatacaaacattagctaggcgtggtggtgggtgcctgtaatcacagctactagggaggctgaggcaggagaatcacttgagccctggaggcagaggttgcagtcagctgacatcacgccactgtactctagcctgggtgacagagtgagactctatctcaaaaaaatcccagatctgctcaccatgtgatactgaatttatttaaactcactgtccctgtaaagtggggaggaataatagtaactggtatatacctcaaagagtcattcttataaaattaaattagttgatctaggtagagtgtttggcagaacaccttgtacacagtaaggactcaataaatattaggtattctaatcacctaaaatcttttccaccctttaagttatattactctaggatcctgagagggaataatgactttttttaatggtaaccactctcctattaagttcatgcctcaggcaaaaaaaaaaaaagtcaaggctagacacaagtgctgatgagagaaagacaatgattactagagacttggagagtaatttaaggagtcaggagaaaaataggcaaataaattccaaaatgagacattaagaaaaaatgattaacacttccagggccctgctaatgagaaaaaacaacttgcgaaatatatttttgctaagcatatttaaaatacacatgtcctctgtccctggaatctcttacagaaacacctattttggtgaacaattatatattgtataaatatgtcactgcagcattatattacagatgtattgcaatgtacgcacaacaaatacataaatgtatacaaaccaactgtaacagcatgctacagtgctgtgtagacatctgtgcaaggtacaatgggaccccggtcaactatcttatagccagttttgtctttttcaagacatatattcaaagcatctcagaactgggctgagggagcaaagcctttacgataccacacaggatggcacatttcactgacctgacactcactacgtgtgcctaatacaatttctccaaggatacagactcaggattgacagtagtgacctaggagaagtaaggggaagaggcaaggggactttctttttttcttttttttttttttttacatctgaatttttccacattctactctctggctgatacaacaaattctctagacccgggtttctcagccttggcatgactggcacttggggctggagagtcctttgtagttgtgatgcctcgtgccctgtgtgttgcaggatgttaagtagcatccctggcctctacccactagatacccacgtggcaaatgtgctaaatgccacctggagggcaacattgccctcggttaagagttactgccccagccaatgtgttggccttattaaatgtaatttattccatgatataagcacaagccactgtgactgcccaggccacctgggccatactgcctttccctagttcagggaaacatgtatgagaatccactttgagttgttaaaatcccctgggtttgagtcccaactgtctcccatatgatgttctgacattccctatgcatctggggacccaccaggagtttctttgtgcaactacctcatattcaagaacaatgtttgttattgttgttttgggagtgggtttcactcctattgcccaggctggagtgcaatggcacgatcttggctcactgcagcctctgcctcccaggctcgagcaattctcctgccttagcctctcaactagctgagattacaggcgcatgccaccatgcctggctaatttttggttttcttttgttttttgacagagacagggtttctccatgttgtccagactggtctcaaactcctgagctcaagtgatccgcctgcctccgcctcccaaagtgctgggattataggtgtgagatatcgcatctggctcaaggacaattttagaaaagtaaatcatttctttctgataaatacacacacataatctttagagtctctttctttctaccgactactttaaaagtcagaagtacaactatctgagctcctcattcgtgataacacactggccttgtgattttttttaaggaaattacatcttaaatgttcatgttttcatgctcccaaattcattcttcatgtcctgaaaacttcttacactctatctggttttgttggtttgtttcctttcttgttttattttggtttttgtcttttgctatgtgaatcttacaatagcttctgatctaaaagagtaacctagggcacagtggctcacgcctgtaatcccagcactttgggaggctgaggtgggtggatcacaaggtcaggagatcgagaccatcctggctaacatggtgaaaccccgtctctactaaaaatacaaaaaattagccgggtgtggtggcgtgcacctgtagtcccagctactcgggaggctgaggcaggagaatggcatgaacccgggaggcggaggttgtagtgagccaagaccacacctttgcagtccagcctaggtgacagagcaagactccgtctcaggaaaaaaaaaaaaaaaaagaactttgaaaaactaggtgccccatcactcatttgtaagttgacatttaaaacatttttgtctccagtttaaatagttgcagaagatatcattttaggcatgtaaatatgcagacagatagatcagatatagatagataggtaggtaggtaagtaaggaggtaggtaggtagctaggtagatagatttgtttaaataaaactgtttcattagtcttttgtttgtttgttttttgttgtttttttttttgagacggtctcactctgttgcccaggctggagtgcaatggcgcaatctcggctcactgcaacctccaccttccgggttcaagcgattctcctgtttcagcctcccaagtagctaggattacaggtgcccgccaccatgcctggctaatttttgttttttgtcttttttttaatagagacggggtttcgccatgttggccaggctggtgttcagctcctgacctcaggtgatccacttgcctcagcctcccaaagtgctgggattagcaggtgtgagccaccatgcccggcctatctcatcagtcttttaagtgaatccagtaggtcctaaatagaatagagattttattcccatcattatccacttaaaaacagaatacataaacaagcctatgtttctttgtttgatgcacttttgtttgcatgttacattttacacacacacacacacaaatgcaccataagcaaactctttttcaaaagccaaaaaatttacatcattgctttttctgcttgacttgtatttcaattctatttcaccacagaatatatcctaaagcaacttatatttatactagaaaatctattgattttgtttgtttgtttttgatgaagtctcactctattgcccaggctggagtgcaagggtgcatgcaatcttggctcactgcaacctctgcctccccggttcaagcaattctcctgcctcggcttcccaagtagctgggattagaggcatgtgacaccatgcccagctaactttgtatttttagcagagacggggtttcaccatgttggtcacgctggtctcaaacttctgaccttaggtgatccacccacctcagcctcccaaagtgctgggattacaggcataagccaccgcacccagccatattattgatttctttatcatgcttccctgccataaaaatatctgcatacattttagattaaaaccctcagtaaaatcagcatagaagagacataccttaaggtaataaaagtcatccaggacaaacccacaaccaacattatactgaaaggggaaaagttgaaagcattccccctgggaaatggaacaagacaaggatacccactttcaccacttctattcaacatagtactagaagtcccagccacagcaatcagacaagagaaagaaagaaagggcatccaaatcagtaaagaggaagtcaaacatcgctgtttgccgacgatatgatcgtatacctagaaaaccctgaagactcatccaaaaacctcctagaactgatacataaattcagcaaagtttcaggatacaagattaatgtatacatatcagtagctctgctatacaccaacagcaataaagctgagaatcaaagcaaaaactcaaccccttttacaatagctgcaaaataataataataatacttaggaatacacctaaccaaggaggtgaaagacctctacaaggactgctgaaaagaagtcataaatgacacaaacacatggaaacacctcccatgcacacagatgggtagaatcaatatggtaaaaatgaccacactgccaaaagcaatctacaaattcaacgcaattcccatcaaaacaccaccatcattcttcacagaactagaaaaaataatcctaaaattcgtatggaaccaaaaaagagcccacatagccaaagcaagactaagcaaacagaacaaatctggaggcatcacactacccaacttgaaactatactttaagactacagtcaccaaaacagcatggtactggtataaaaatagacatgtagaccaatggaatagaatagagaacccagaaataaaggtaaatacttacagccaactgatcttctacaaagcaaacaaaaacaaagtggagaaaggacgtcctattcaacaaatggtgctgggatcattggaaagccacatatagaagaacaaaactggatcctcatctctcaccttatacaaaaatcaacttaagatggatcaaagacttaaatgtaagacctgaaaccataaaaattctagaagataacactggaaaaacccttctagacattgacttaggcaaagatttcatgaccaagaacccaaaagcaaatgcaacaaaaacaacgataaacagataagacttttaaactaaaaagcttctgtaggtcaggcacagtggctcacacctgtggtcccagcactctgggaggctgagacaggcagataatttgaggtccagcgtttaagaccagcctggccaacatggtgaaactccgtctctactgaaaatacaaaaaatagccaggcatggtggtgggcgcctgtagtcccagctacttgggaggctgaggcaggagaatcgcttgaaccctggtgacagaggatgcagtgagctgagaccgcaccaccacactccagcctgggcgacagagtgaggctccatgtcaaaaaacaataaaataaataaataaataaataaataaataaataataaaaagcttcttcacagcaaaagaaataatcagcaaacaggcaacccacagagtgggagaaaacctttgcaacctatacatctgacaaaggaccaatatccagaatctacaaggaactcaaacaaatcagcaagaaaaaaacaaacaatcccatcaacaagtggcctaaggacatgaatggacaattctcaaatgaagatatacaaatggccaacaaacataagaaaaaacgctcaacatcactaatgatcagggaaatgcaaatcaaaaccacaatgcaacaccccttactcctgcaagaatgaccataatgaaaaaatcagaatataatagctgttggtgtggatgtggtgaaaagggaacacttttacactgccagtgggaatgtaaactaacacaaccactgtggaaaacagtgtggaagttccttttaaagaactaaaagtagatctaccattggatccagcaatcccactactaggtatctactcagaggaaaagaagtcattacacaaaaaacatacttgcacacacgtgtttatagcaacacaattcacaattgcaaaaatatggaaccagcccaaatgcccaccaatcaaggagtggataaagaaaatgtgatatatatatatatatatacatacacacacacacacacacacacacacacacacacacacatatatatacacatatatgtatatatgtatgtatatatatacacatatatgtatatatgtatgtatatatatatacatatatgtgtgtgggtatatacatatatatatcatggactactactcacccataaaaaggaatgaaataatggtactcgcagcaatctggatggaattcattattctatgtgaagtaactcaggaatggaaaaccaaacatcacatcttcactcataagcgggagctaagctaggcataagaatgatacaatggactctgggaatctggtggaaagggtaggggggctaggggtgagcgataaaagactacatattggggacagtgtacattgcttgggtgatgggtacaccaaaatctcagaaattaccgctaaagaacttatccttttaaccaaacatcacctgttccccccaaaacctactgaaactaaaaaaaaagaaaaaaaaaaaaaaaagggcaaaaataaataaatacctacatacattttaatttaattttttaaattttcctatgagcctagggctctaaatgcttacataacaatttcttggatttaataatgataactattagtgataggaaagagatacataagaataaataatatataagaaaccattttataattattaaacattacaaagcaaaatgttatttgaaatgtatatgttagtgaatggggctttattcttgttttttcaattcattcatctatatgaggatagttattaagtagtcattactagaataagacagagttcatcaattttatttttatttgatttttttcttttttgttttgtttttttctttttcataacataaggaaagagaaaatgtgttcatataaatgagaggatgggggaaaaaaagagatgttgtgttataatactggcattctgttctttgtactattttcaagttacagatccaaaatccctccatcatggaaaattactttcaaggacctctctgttgacaatttgattagatccaccttcaaaggacaggatcacatcagaactgctaaaggaattgtgggccgggcatggtggctcacacctgtaatcccagcactttggaaggccgagttgggtagaccacctgaggtcaggagttcgagaccagcctggccaacacggcaaaaccccatctctactaaaaccacaaaaaaaaaattagccaggcgtggtggtgcacacctgtaatcccagttactcgggagcctgcagcaggggaattgtttgaactcgggaggcggaggttgcagtgagccaagatccagccactgcactccagcctggacaacagagggagactccatttcaaaaaaaaaaaaaaaaaaaatggacttatgcccagtgattagagacaaggcccttcactttctccgtgccagcaccaacattccaaggggccctccatgtctgcctgaagaccatgccacccagagacaaggttataaggcaagagcatctttcttgtgtaaggtgggaaagggaagctgtgccaaggaaggaaagaaagtagggctggcttccccggcattctcaggcacagcagttatagggaagagaacgtatggaagctgaggacctagaaactaattttctcaacactctctgtgcacctgtgtatggctcagaaaggacagtgtttttgacggaacagtggctccagtctaacagctactgactcagatggcctctggcaggctccacctccaggctagtttttccagatcgcagggctataaaaactgaagaaagaaaccaaaccctgatcaactaaaagggaaacccacatattacacgccttttgatatgggtaatacatctgcaatacacagcaccatgacatcttcatgcctgaaaaatggaatctgaactaatcaagactccaggtctaactctcagcttacaggaaatacaggggactgaggaacaagttaggcagcaccacgaggaagtaatcagccaacattctagagacaaatgacccagtttctccaacaaattactagcatgaaaaaaaaaatgaactgttaaaaaattaaagagacttaaaagatataacaagcaaatgcaatatagaaaccttgtttggaccccaattataacaaaacaatattagatgacacctttagaaagatgaagaaaatctgaatatggactggatgttagatcataaaaaggaattattaatttggtaggtataatggccatgtgattatgtttatttttaaaaagtcattcagttagacatgtgtgttgaatttacaggtggaattacatgtcatctgggattagcttttataaaatattctaacctcccaagaagttttggggaggacaggtgaactgagattagcaaaatgtcaataatgattgaagttgggagatgggtgtctgggatgcattacaggcttctatccacaatttttacatgtttaacaatgtctataatatgctgggttccataactcacgcctgtaatcccagcacttttggaggcctaggcaggtggatcacttgagcccaggagttcaagaccagcctgggcaacatggtgaaaccccatctctgcaaaaactcaaaaatcagccaggcacgttggcacatgcctgtagtcccagctacttgggaggctgagttgggaggatcacctgagtccagagaagttgaagctgcagtgaaccatgactgtgccactgtactctagcctgggtgacagggtaaggctctgtctcaaaaaaaaaaaaaaaaaaaaaaaaaaggcctataaaaaagatcttttaagggagaaggggaggaaaaagtatatttagttagagccaactatgtattaggctaggcctgtgctaggcccttaccaaataagatcttatttccctagtcctgaggcagctgtcaaataaacctcgattgctgtctaaagagaaatgggcatttgataagctgggaaataaatatggcaggtgataagagggaggtgttagtgcctgaggaacacagagatgcatctaggtcgcaaggggagggactgaagacagcccttggcagacacatgtcagaatcagtatgcctcaatttccatttctcctactacatgctacttacccctgcagcaaagccaagacttccatctaagatccgcctctgaaaatcaaaacaagatgtttcagtttccaagagacaataagatgatgtttcctgggacaagaagaaaccataaggcccaaaagagccacgcaaataaagactggccgactcctgagctcgtgagctactcagtttataccatgggccaagaaccacggggaaagtctttggttaactttccacccaccccatagccaatcagaagcgttctttcaagtggtgcttggcttgtcttggcccttgtgttgtctcttactcagctttccctgtgaattacaactgtaaacctttagtaagtagcctgtctacaagttgggaattactgagcgttggtgaggagcagaggagcaggtggaacaatcaaaaccctcacacaggccgggcacagtgctcacatgtgtaatcccagcactgtgggaggctgaggcgggcagatcacctgaggtcaggagttcaagaccagcctagccaacatgatgaaaccccatctctactaaaaatacaaaaaaaaataggctgggtgcaagggttcatgcctataatcccagcactttgcgaggccaaggcaggtggatcacctgaggtcaggaatctgaggtcagcctggctaacgtggtgaaactccatctctactaaaaatacaaaaattagtcaagcacggtaatgcatgcctgtaatcgcagctacttggctgagacaggagaatcccttgaactcgggaggcagacattgcagtgagccaagatcatgccattgcactctagcctaggcaacaagagcaaaactccgcctcaaaaaaaaaaaaaaaaaaaaccctcacacaatggcggtgcaaacgggtaccaccattttggcaaactatttggcagcaccgatgagaggtgaacactatgtgtgccactcctgagtaatcccatgacaggaatgcacttgtattcaacaaacccatgaagaaaaatgttcggcagtgctaagagcccaaaactagaaactacccaaactctcaccaacagtaggatggatatgttaactaggatacactcatacaacaggtaccataatggcgatgggaacgcacacacatactacagttacatcttacaaacagacagggacattaaagaaactggaaaacaagtagggtaaaatcagccagatgcagaacagtacgtactatatgattactccatctaaataaagcacagaaacagggaaaatatccgtgctgttagagatcacatgggagatgacccttggagtaaaggttggggatggtgagattggaagggagactgaaggctcctgattggaaggggctgtgaggtgaggagctggtactgttttgtttcttgatctgggctctagtttcatgagcacttgtggaaagttatcaagctgcatacttatattaggttggtgcaaacctaataaaatgcaccagcctaataaaatgtgcatttttccataagcatcttctatttcaatacagatttttttttttttgctatctatccatagatgaatggataaacaaaatgtggtatgtacatacaatggaatagtcttcagccttaaaaacaaaagaaattctggcacatgttataacgtggatgagctctatggacattctttgaagtgaaagaagccatgtggtctacagaacttttcaccttacaaaattaaaactcagctgggcatgatggtgcacacctgtaatcccagcagtctgggaggccgaggcaggcagatcacttgaggtcaggagctcaaaacctgcctgagcaacatagtgaaaccccatctccactacaaatacaaaaattagctgggcatggtggtgcacacccgtagtctcagctacttgggaggctgaggtgggacgatcacttgaacccaggaggtggaggttgcagtgagctgagatcatgccactgaaccccagcctgggtgacagggcaagactctagctcaaaaaaaataaaaaataaataaataaaacagcctggccggatggggttaccagcgaaaccccgtctctactaaaactacaaaaaaaattagctgagcgtggtggtgtatgcatgtaatcccagctactcgggaggctgaggcagaagaaccttttgaacctgggaagcagaggttgcagtgaaccaagatcacgccactgcactccagcctgggtgacagagcaagactctgtctaaagaaaaaaaaaacaaacaaaaacaaaaaaccctgaaactctgtactcattcaagaataacttatttctgccctcctctgtggcccctggcaatcaccattctacaatgtgtctctgtgaatttgacttatcttggcatcttatatacctaggttccagataaaccatgtttctggattgtgtgttttctgatttccagtctccaacccatcagctcccgggggcagtgcagcgcagcaagggaggtcgggattttattgttgaaatcaaggcctgctgtactggtctctaacacaagagtgcctgacttgtgaacttcctaaaggtgttttcatttccagatctccctcacaacatgttgaactagatcttaagtcacttattcatttgccgtttctacaatgtctcaggctaccgaggtgatcgatgcagggattgtgcattcatcaagatacccatggatggctccagggctgcggactgagggtgatctgggttggagaaaagaatgcaatttcaggtatatgaggtgagtgtgggttgtgcagaggtgtggggagggcatatgggtatgggtatgtgtgcaagtgtgggtatgtgggactataggtagagcgtgtagaaggggtgtaaggatggggttgtgggaggagggagagataggctgtggggccatgacagtgagtgagggcactgggagtaggatacaaggaagatgtaggagaaagaagtaagagtttgcagggggccagggacatgggtctgtctatattcatcccaaggggaaaggaaacaacctggagatgggttgaaaaaaaagggaacagatgccccttcttctcccaaggtctttccaaccatcccacccaactcaagtccacaggggaggacagttacacctgaaatctaatgttcttcggtcacgcatagtaccacttgctccaggcctgaaagaaattacatggcaggccaggcacggtggctcacacctgcaatcccagcactgtgggaggccgaggtgggtggatcatctgaggtcaggagtttgagaccagtggtgaaatcccacctctactaaaaatacaaaaattagccaggcgtggtggcacatgcctgtaatcccagctactctggaggctgaggcaggagaatcacttgaacccgggaggtggaggttgcagagagctgagatcctgccactgcacgccaggctgggcaacagagcaagattctgtctcaaaaaaaaaaagaaaaaagaaaaaagaaaagaaattacatggcaggtagaaattaggcagcgggctaacgaagcctcaataactgggcttctcacttcctattcccttcaagtcaggctgtcaagggtcaagaggggagatgatggtgcatgaaggtgtctacagcaagcagacatctgttctcccggcctggcagggagaaggtgagaaaataagaagacagcgaacaaaccccagtacacaatgcctgggggtgtggccaggggcactgaaaagtctacaaacctgctccatggagtgggacagtgcccctttaccaacgggctccccaccaacatccagaaccaaagcaaggcaactcacctgtccactagagaatacgaacacgagagctgccccagctgctgtcatcccccaggtgaagaaggtccccagcaaggcctggaacacagagctgtggccttggagcatgctggatacagctgtgcaagaggagcgagagggtcagccaccggtggtccgtttcagtgacaggcgcatattctgacgggtcctaacaccctgtgtgggagctggcctccctccaggttgaccgtatgcacccttccaccacgccatctgtgtccctcagccacccagcacacaggtcaggcttctctatccaggtcccccaggaactggaaatcgtcttaatctgaaagaaggcacagggagatgccaggggaatccacaaaaaaggctgcaacattgaaaagtggtttcaaagagaagcacaaagaatgtggtttattccagaagaagggggcataggagggtctgatgcagcctcccccacataatctgcctcttctaccgtctcttgcccaccatccgcactcagcctccaccaaagacaggtgactagctcaggtgatgtcaacacgcttccaatcttaatccccatcacatctgcaacagcgcacctgcccagccaaagggtaaactccaccaaccaacttttgatacccaccaacccccgactctccaatcccgttctccatcatgcctgcacgagcacccaactccagctcaactgaattatttatggcaccttccacaagccccagacaatcctgcctccaagtccctgttcatgcagttccctcctggaataccttccttgcacatttccagccatcagaacccggagcaccctctgcagcccacataatgccaacctcacgaccaaggcttttctggccttccccagccctgtcctagcatgcagctttggtcctctctcagtgtggctttgcctccatcttttacagccttagttgcttgaggacggggacggtgctttttcacatttggcacccctgtaaaatagggctttgtaacccctgaaaaatatgtgctggatggaaaagggccagcttacctgcacaggacagtcagcaaggacaagcaaaaggacccaggaatggaatgtcccctggtcaactcagcaccctgctgctgaagctgaagttacaccaccgcccaccaaggaaaggaagggaagtaccactccctctcatttcagtccagagaacctcctccagactttaacatgcttaaaattctggatctgagatgacaatcagatctctccctgtggaaagttacaaggcagagaaacccatttgttgaaaagccctgtgttctggtacacaaacactgggctcagggcctcatatcaaagcctcattcatctccctgatggtctgccagcacccagagggctggctggacacaaccacactgggctcagccctgccagttcccggtgctctgtgaggagccagcagccctgagcctgcagatcaagagctgaagacgctgcctcgattgaccctggaaggaaaccatggcagagtgtggacgcagcccttatgccaagcggctcagcaacacacccaggctcaaacctaggaagggtataggtccaggtgagcccaggtgagccctggctcagcccctgtgccagaaactctgagataaatagcatctatggaatcagactctagttcccgcactctaaacgaactgcaccaactgtgaaaactgtgaccacgccaattaaagaaaaaaaaaatcattttcaaaaaactactaccctttacatccgtcatcttgctaagccaccctaaaaagaggggttggtctttgtttttaaaccaagccatctggaccattacaccaatcatctattccgagttgctgtggacaaaatttcaaacagcatttacaaagaacagcacaaagggatcatcctcttagtacttatcatccaagacagggcataacaaaaacacctttctttcctgtatttgaatgtgcctcttgacagctacagaagagagcaaacaatttacatttgccaacaggccaaagtcaatgtggatcttgtgggctggtgaacagaacagagggagctcgtgggtgttcctggtggttagtgggatagggaaacacccgtctaagcctgtccccatgtatatctgagcaccctcctgagtaagaaaaagggacacagagggaagaccgaggccaccatcctttccatcccaacaggagcagcattgatcacgggcaatgcaagcccagtgcccctcggagaagtttcttctctatttgctgttttaaatcctcgctacaagggtggtcagagaaccagcagcactggtccggcttgggagctagttaggaatgcagaaactcaggtctcaccccagactttctgaatcagggtctgcattttgtggaattccatgggggattcttatgcacattaaactgtggaaagcaaaagattaaaactggtaaaacttggccaggcgcagtggctcatgcctgtaatcccagcaccttgggaggccaagacgggcagatcacctgaggtcaggagttcgagaccagcctggccaacacggtgaaaccccatctctactaaaaacacaaaaattacttgggcgtcgtggtgtgtgcctgtagtcccagtgcctgtagtcccagctactcgggaggctgaggcaggagtaatcgcttgaacccgggaggcggaggttgcagtgagccgagatcgcgccactgcactccagtccgggtgacagagcaaggctctgtctcaaaaaaaaataaaaataaataaataaataaaactggtaaaacttctacaataccaagagcttagaaaatgagttctcctgccccatgtgggattggcaagagcaaagaagagtcccaaaagaacagaaagttttctgcagagtctcaagagaagaaaaagtttctggcagagtcccaagagaacaagaagttttctctaaccggcagaccagtaacaactttaggacacagcatctccatcacagcttacacaatggggctcagaattcctcacgatggggatattaattccatcaaccctgattcgttagcagcagggagaatcattctctgaccgttccaacttttaacatgccaacagcctgtagacttgtacacacctgccacagcagcacatgggcattcccggctgattgatacaggtttgttttctttatttcctttctcccccttttaaacctgttgttccgcttccaagagtcagttcaagaggctggtgaagttgcagaagtggaaacagcactagggctgctgggccttagtggagctgcacacacatgccctaactccacgagggggaatccagcagaaggattcaggtctgggcggagaggactgtggaaaagttctctaatgcctcgctactcaaagcgtggtccgcggaccacccaacctgggaattagttagaaatgcacactgtcacgccccacccagacctgctgcaagttaaccagattcccagtcaagttccagaggtccagctaacagccagagcaagtgggaggggcctgggagcagctggatttgtagctgcctctgctcccaggaatcccgggtacccccacacaccgcctaggaagggacgaacgaagaggatttgggttaggactgtaaaaggaaggcatgtcattgccttccagatcaccctggagagggacatagccggggtccggggacttccttcccaccgcccctcaccctcccaccccgccccgacacctgccaaagcctccaatttctcctccaaacccctcctctctccaggcgtacccccttccaagctccaggtggctgcccttccaagtcccacactcttgtcctgatggcctccgaccccgggcctcgagcccaaccaaaggcaccgaaggagagaaaagccaactcactagggtgccctctccagcccccactgcacttccatcagcccccgctgccactctctcgccggctccactcccgcagtcacttcctgcttccctcccgcacacgtggccctcccgcctccgggccccgcccccttggccgcaactggcaactcccgcctgaagaatagattctctggttcacagccgtctgcaggctcaggaacagatctgggcgggcagaacagagccctgaggccaagagcccagcagtctgcgagtgactgcagccctaagggaagctacaaacacccaaggaaagagccctttgtaacacccctgatgttacttatgcttctacacctttggcagccaggtccatgccactgggtgcgcagcagagcaggatgtgctgtgtgtgtgttgcgggagaggctgggggcgggtaatgtgatggcatcggcatcattctccagtcaatgaccctcaaaagaatcactggagggggtcaaacacaaaatgccagcacccccagaggctctggttccgtcattctgggtggggctgacattttgggatttttttgtttttgcttttgtttttttgagatggagtctcgctctttcgcccaggctggagtgccgtggcccaatctcgggtgattgcagcctctgcctcctatgttcaagcgattctcctgcttcagcctcccgagtagctgggatcacaggtgcatgctgccaagccccgctaatttttgtttttttttttttttttttttttttttagtagggacggggtttcaccacgttgcccaggctggcctcgaacccctgacctcaaatgatccactcgtgtgggcctcccaaagtgctggattataggcatgagccaccgcgcctggcctgagatcttgttttgagctaggagttgctgatgctgctgtcctgggaccaccctttgaaaagcactgccctaggtcaaaggctttgatctgcaggatttctgtgaaaagaccagaggataggattgactagatttagccaaaaacaaaacaaaataaataaatagatagaaacaagatgcctgggctgggcgctgtggctcacgcctataatcccagcactttgggaggccgaggcgggcagatcacaacgtctggagatcgagaccatcctggctaatacggtgaaaccccgtctctactaaaaatacaaaaaattagctgggcgtggtggcaggcgcctgtagtcccagctactcgggagtctgaggcaggagaatggcgtgaacccgagaggccgagcttgcagtgagccaagatcacgccactgcactccagcctgggcaacagagcaaaactccatctcaaaaaaaaaaaaaaaagcctgattaaatttgaatttcagaaaaataacgtcatttattactataaatatgccccgggcaatgtgtgggacatacttatgttacaggcatatttgttgttgatctgaaactgaaacccagctgagtgtcctgtgttttatttgacaacatatcagagcgtgacctgagcagaaaagctacccgtggtctcgatggccatagcccaaagggtccaataacaggcctctttcttccagtggaactaggttgttcacactgacggtcgcaccatataccaagcactccatggggaggagaagacagcctggccactggagggtggtctttgcccttaaaagacccccaacttggaagagtcaaatcagccattgcaattccacataagagagtatgtacaggcacacagagacacaatacccatgtggcacggcccatcaactcatcttccaaaatgtcatacctcttcctgcacgctgcaatagccataaaatgacacaatatcttagactcacttcaaaatatgatggaagagaaaagtggatggagtagagattaaacaaaattggccatgaattaaccattcttaggctgggcatggtggttcacacctgtaatcccagcactttgggaggacaaggtgggcagattgtttgagcccaagagtttgagaccggcctgggcaaaaaagcaagatctcgtcgctacaaaaagtttttaaaaagtagctggacatggtggcagatggtagctgggcctgtagtcccagctactagggaggctgagtggggaggatcacttgagcccaggagtttgaggctgcagtgagccgtaatggtgccactgcactccagtgaaagaccctgtctcttaaaaataaaaaattaaccattgttgaacctggggaacgggcacgtagaggttcattaaatgtttctgtttctacttttgtggatgcttaaattcttttctttttttttgagacggagtctcgccctgtcacccaggctggagtgcagtggtgcaatctcggctcgctgcaccctccacctcccaggttcaagtgattctcctgcctcagctggcctcccaattagctgggactacaggtgcgtgccaccacacccagctaattttttgtatttttagtagagacggggttttgccatgttggccaggctggtctcaacctcctgagctcaagcaatccacctgcctcagcctcccaaaatgctaggattacaggagtgagacactgcgcccagccgcttaaattctttataatgaaaaataaacagaaatgtttacaacgatccacaaagtgcctctcctgcccaatcctttctctcctttctcactgctgctgtgaggattcaacctgcccatccctcatctaggtcatggagtcacctccttccactccaccctgtctagtctgttccatgtagcaccgccaagatcagcctgcctaaagcacagcacatcacactctcctgctcaaaaagctccgatagctccccagtgcctttggcataaagttcaaatgcttcagcctggaatttgagttttgctgtggtatgattccaactaaacgttctcaagtctgtctcccagggttctcctccctgtgccctctggccaagccaggctggacagctcgctgtcctccacacagccttccctccctgccactcctatctcccttataccatttctgctgaactgcccttcgcctcccaaatctaagccccaccatcctgcaagacccaggtttaatgcattctccttgggcaccccatctgacctcatctcccacctgtcccagccctggttacaaatcgagtctctatcctctaaggtcccatagaactccatctggattctaaggcacttgcctccttctgtcttatactgtaggatctaacttcactgctatattcggcatacagacccaggattagaatcaagctccttactgagcttcttcccctcatcccagccaggatagcacctcatattatagcatgtcctcaagagatgcttgcatgcaatgcataggtaaacttgatgtgggaaaggaaaagtggggaagcaactaacatttgttgaatgcccaacctgggccactttatctttatatcctcttcttatgtaaaactcacaactctgaggggaaggtatcattatccccattctacagataaggaaattgaggctcaggaaagctctggagtgacccaaggtccatggggcagtgtgggacaccaagcccagctgactcctgagatggtgcccttcctgcatggggcattcagggctcacaggatgagacccagagccaccttgatcagcatttctgcatctcactttctttaaaccacaccaagcccataagcgggaggggtgctaacccccaggagacaaatcttaccatttccccatctttctcaataaactcccacacatatgcccactccgcaaacatgcaaactgccccctttcacatacttccttacagtcaaaagggccagagtattggccagaagaaaatgtttcctgggccaggtgcggtggctcacgtctgtaatcccaaaacttcgggaggctgaggtgggtggatcacgtgaggtcaggagttcgagatcagcctggccaacatggtgaaaccccatctctactaaaaatacaaaaataagctggccatggtggcaggcgcctgtaagcctagctactcgggatgctgaggcaggagaatcgcttgaacctgggagacggaggtcgcagtgagccgagatcatgccattgtgctccagcctagacgacaagagcaaaactccatctcaaaaaaagaagaaagaagaaaatgtttcctgaaagctaaatacactggctctgacctccaccccacccacagtccattcctattctctcccatgggacctaaggtggcctgacgcccccagggcaaagggatgggatatgcaggaacagaccagaacagtggctccagaagcagtggcagggggatttgcaggcagtgaaggctgcttcccatgcgtcacagggccctaagactgatgccaaccatccgcaaaggaactgcaaggcaacaagatggtgggcggccctttccagaggagtcactgtggtttgatctggctaaatgccctgctggcacctcctcctggaagactgtggtggcgggggggcaagcagagggatcatggacagcagctttgcagaaagaatggagacgggcataaagttgtccaccccaatgagtcctggatctcacctttgtttttctccctctccctctctctctctctccctctccctctctctcatcctgtttctcttaaaaggtaatatagcagttgattgctagcctcagaatctgaccacacagaagaaagcctagcttggcatgtgggttctcacggatgcattgcccaacacctcttgaaaccaccattgcaaaactgtaacagaggccaggcatggtggctcacacatgtcatcccagcactttgagaggtcgaggcaggcggatcacttgaagtcaggagtttgagaccagtctggccaatatggcgaaaccccgtctctactaaaaatacaaaaattagccaggcgtgatggaaggcgcctgtaatcccaacttctggggaggctgaggcatgagaatcacatgaacctgagaggcagagggtgcagtgagccaagatcatgccactgcactccagcctggggaacagagcgagactccgtctcaaaaaaaaaagaaaaattggcgccactgcacttcagcctggggaacagagtgagactccgtctcaaaaaaaaaagaaaaaagaaaaattggcaccactgcactccagcctggggaacagagcaagactccatctcaaaaaaaaaaaaaaaaaaagaaagaaagaaaaaatacaactgtaatggcaacagtgaaagagatttgacctaaccaactctatcttgcttctaacctccaaactgttcttgttcattcctagacataggttgaactacctttaggaggaatttatagtttatagtttaaaacaaagatgataacagccctttcccaaaacaaacctgcttcttgcctggggtttaggcaagaagcctttgtaggactaacaaattagtcacaagattagaaattatgactgggcacagtggctcacgcctgtaatcccagcactatgggaagccaagatgggcagataacctgaggtcaggagtttgagaccagcctggccaacatggtaaaaccccgtttctactaaaaacacaaaaattagccgggcgtgctggctcacacctgtaatcccagctacacaggaggctgagatgcaagaatcgcttgaacccaggaggtggaggctgcagtaagccaagatcacaccactgcactccagcctgagcaagagtgagactccacctcaaaaaaaaagagaaaaaagaaaaaagaaattatggtttatgaatcatgcagctagaggctacaagattctgaccctccctaaactgcttctaagatcagtgcttgagatattttgcagaacctgcacttgacggatcagttggcaccacccagatagataaactggtttatgtgatcttgtggcccctacctaggaactgactccgcacaagaggacggcttcaactccctatagtttcatctccaaaccaatcaatcagcactctcaactgaatggccttccccattcaccaaattatccttaaaaactctgatcttggctgggcatggtggctcacaccttaatcccagcactttgggaggctgaggtgggcagatcacctgaggtcaggagttcgagaccagcctggccaacatggcgaaaccccgtctctactaaaaatacaaaaattagccggggatagtggtgtgcacctgtagtcccagctactcaggagtctgaggcaggagaatcgcttgaacccaggaggtggaggtttcagtgagccaagatcgcaccactacactccagacttcatatcaaaaaacaaacaaacaaaaaacctctgatccccagtgctctgggagactgatttgagtaacaataaaactccggtggcagggtgctttgcaggcaacgaggactgcttcccatgcatcagaggaccctgactgatgctgatcatcagcaaaggaactgcaggacaagagggtggatggccttttccacagcaattgctgtagtttggtctggctaaatgccatgctggcacctcctcctggaagacggcagtgggacagagcagggcacagcctgctctgcatgaattactctttctctattgcaattcccctgtcttaataaatgggctctgtctaagcagtgggcaaggtgaacccattgggcagttgtactctcggcttcattctcctcatcctgagtctgggaataaataacacagtgctctctccaggttactgtgacctggagtgacgcctccaacaccctgcctagcacgtatccaggctcccttgaacgattattacccatcagccctcttcctccttcacttattcgttcttcatggactcagcagacctttcttcagtgcttaccctgtgtcgtgcactttgctggagccgggtacagggcagccaactcaacagatgaggctctgccttgtccgccctcgcttgcctgccatttcctcccctgtgctggaggctgaccaccgacacagcgtgaggactgagcctctgagcctggggcagcctgttccttccttccgcagagtgcagataataaacccagcaggaactggctctcagatttgcagatgggaacccaacagtgacagtaataggcagtttatagacgtgctatagaaatataaggggtttcctattgttatttgttcaggggattttttaaattaccctccacccatctatgcagaattcatccccttccctccaccgccaccgctgtcacctgtacccaaacaactctgcttcatcatcctgccctaaccacctgataggtgttcctgattcccccagtgccctccaaacagttcccactcttcacagcagccaaagtgatgttttaaagacaaaaaatacaggctgggcacggtggctcacacctgtaatcccagcactttggaaggcaaaggcgagtggatcccttgaggtcaggagttcgagaccagcctcgccaacggggtgaaaccccatctctactaaaaatacaaaaattagccgggtatggtggcgcatgcctgtagtctcagctacttacgaggctgaggcaggagaatcgcttgaacctgggaggtgaaggttgcagtcagtcaagatcgtggcactgcactccagcccaggtgacagagtatgactctgtctcaaacaaaaaaaaaaaagacaaaaatacagtcatgccagtctactatgacaaaccctctgagagctccacactgcccttgatgtaaacgctggtggcttcaggaacacccagaatcactccgaaccccttcctcactctgcttcatccaggctgatctgccttctcctggaacaccaagcacactcctgcctcagggcctttgcacttgctgcaccctctttctgtctcccaaattttcatctgtctgggtcctctgttatttggatctcagctccaatgctaccctttccaagaggccttcctggaatatccaatctaatgtagatcatccaagccattctttattttcttcctggcacatcttgatgtctggtaatcctgtttgtttgtttggttggtctccccaaatgcaagttccatgagagcactaccacgtctgccttttgtattactgtatccccagtgcatggtacacagtagctgttcaagatttatttaaagagtaagtcaatctgacacataagtcttatctttttttctttttagacagaggctcgctctgtcacccaggctggagtgcggtggcacaatcttggctcactgcagcctccatcccccaggttcaagtgattctcctgcctcagtctcctgagtagctgggattacaggtgcccgccagcgtactgggctaagttttgtatttttagtagagacgcggtttcaccatgttgatcaggctggtcttgaactcctggcctcaagtgatctgcccaccttggcctcccaaagtgctggaattataggcatgagccactgtgcccggcctctgaacaggaagttctaaccagcctcttatgtaagcaccatccagggcagccaacagccacctggcaccattttctgggcctagtacaaggaaatgctgcctagaggcttaaaggagaaaccaagttgccaattcagtccctccttacctttgactaatgttcgaatccaaacctgcaccacacaggctcaagggaggcacaacagtaaagctttcactgattttttattatgattatactttaagttctagggtacatgtgtacaacgtgcaggtttgttacatatgtatacatgtgccatgttggtgtgttgcacccattaattcatcctttacattaggtatatctcctaatgctatacctcccccctccccccaccccaccacaggccccggtgtgtgatgttccccttcctgtgtccaagtgttctcattgctcaattcccacctatgagtgagaacatgcggtgtttggttttctgtccttgtgatagtttgaggagaatgatggtttccagcttcatccaggtccctacaaaggacatgaattcatcctttttatggctgcatagtattccacggtgaatatgtgccacattttcttaattcagtctatgattgttggacatttgggttggctccaagtctttgctattgtgactagtgccgcaataaacatatgtgtgcatgtgtctttatagcaacatgatttataatcctttgggtatatacccagtaatgggatggctgggtcaaatggcatttctagttctagatccctgaggaatcgccacactgacttccacaatggttgaactagtttatagtcccaccaacaatgtaaaagtgttcctatttctccacatcctctccagcacatgttgtttcctgactttttaatgatcgccattctaactggtgtgagatggtatctcattgtggttttgattttcatttctctgatggccagagatgatgagcactttttcatgtgtctgttggctgcataaatgtcttcttttgagaagtgtctgttcatatcctttgcccactttttgatggggttggttttttcttgtaaatttgtttgagttctttgtagattctggatattagccctttgtcagatgagtagattgcaaaaattttctcccattctgtaggttgcctgttgactctgatggtagtttcttttgctgtgcagaagctctttagtttaattagatcctatttgtcaattttggcttttgttgtcattgcttttggtgttttagacatgaagtccttgcccatgcctatgtcctgaatggtattgcctgggttttcttctagggtttttgtggttttaggtctaacatttaagtctttaatccatcttgaattaatttttgtataaggtgtaaggaagggatccagtttcagctttctacatatggctagccagttttcccagcaccatttgttaaatagggaatcctttccccatttcttgtttttgtcaggtttgtcaaagatcagatagttatagatgtgtggtattaattctgagggctgtgttctgttgcattggtctgtatctctgttttggtaccagtaccatgctgttttggttactgtagccttgtagtatagtctgaagtcaggtagcatgatgccttttttctttttttttgagacggagtctcgttcttttgcccaggctggacctcagtggtgctatctcagctcactgcaagctccacctcctgggttcacgccattctcctgcctcagcctcccgagtagctgggacacaggcacccgccactgcgcctggctaaatttttgtatttttagtagagacagggttttaccatgttagccaggatggtctcgatctcctgacctcatgatccgcccacctcggcctcccaaagtgctggaattacaggcatgagccaccgtgactggccagtttcactgactttacgcacatctattgttaggagcaacatttctgattttgtgataggttttttttttttttttttttttttttttgaggcagagtctcactctgtcacccaggctggagtgcagtggcacaatctctgctcactgcaacctccacctcctgagttcaagcgattctccctgcctcagcctaccgagtagctgggattacagatgcacgccaccacgcccggctaatttttgtatttttagtagagacagggtttcgccatattggccaggctggtcttgaactcctgacctcaggtgatcctcccaccttagcctcccaaagggctgggattacaggcgtgagccaccgcgcctggacttgtgacaggtattgaaaatgcaaaaccaagcttgcttgactgccagcttaataagatatccagttattacacaaaaaaaaaccccaccactgacagaatatgaaatcatctctgtctctgaaatgataatcggcataaatcagtttttctcatatttctacatttgttgcttcaaacaaatggcatctcatattaagcaattctgtggaggccattttgatacgcttacgaagggaaattgctaaacaattaagttctattttgaggctattctttcacaatttcatggatcatgtaaatgatctgttcattcattcagtcactcagcaaatgtttaccacacactcctgtgtcagaggcacgtctggatcactgggtacacaccaggaggcgaggcagatgcaaccgtggcctcacgatgcttccagtctagaagcttcggaaattggatcaattctgcattagaaactaaggcttattatcaaagctattttattattaaactgcctctctcctttttttcttattcctcataatacatccatgccttccactgctggaagccagtgagtcactctagctagtgaggacaaatcaacaggagagaacaatcgttcacgcgtttcaacacagccaggcccagggccttcacttgcaagtgggttgctgtgagcagagagtgttcccgatggggaggagaccagttacatatcaatgtaaactctgctgataaattgtcaaaagagatctcagaagaaaaggacctaaatctaaagtctaggtatttgtgatttctttctcattctaaagtaatattcattttcctacctaaatttcttactttttcttaaagaagaccttcaaaattgtataagtttcagaatccacaaaacctggatgtgtcctgggtgaatgtttagagatttaagaaggaaaacaaataacttcctctgctgggcagaaccataccccctcccttcccctaaagatgtccatgtcctaatccctgaaacccgtgaaaatgtcaccttacaggacaaaagggtctttgctgatgtgattgagcctcttgagataggagatcatcctggattatctgggtgggcccacataatcagtcacaagggtccttataaggagaaagagggctaggcgaggtggcttaagtgcggtaatcccagcactttgggaggctaaggccagtggatcacctgaggccaggaatttgggaccagcctgggcaacatggtgaaccctgcctctactaaaaatacaaaaaaaattagatgggcatggtagcatgcacctgtagtcccagctgcttgggaggatgaggcacgagaatcgctggaaactgggaggcagagatggcagtgagccaaggtcgcaccaccacgctccaggctgggcaacacgcaagactctatctcaaaaaaaaaaaaaagaaagaaaaagagggagactgcagagtcagactaagaggaggtgattcaacgacaagggaaacagaggttggagtgatgcagccaaaagccaaggaatgttggctggacaagacaaagaaatgggctctgtcctaaggcctccagaaggagtgcagccttgagacacctcgatgtttaggacttctgacctccagaactatgtaagataataaatttgtactgtttcaagctactacgtttgggatcagctgttacagcagccgtgaaaaacacgcttccttttgtctggaaacacctcatttcacagacacccttctccggtgatgttgtgaaccaccaggttccatactgggtcctcgttcactgtcatgactaggtaggaccaactatataatttgcaggacctggtgcaaaatgaaaataggaagcccccggttcaaaaagcaggggggaaaatgccattaaaggaactagaatataaagcttttcctttcttctatgtccctcccctggcaatgtggagactccattgtttcactgaactttgcttacaaaacacaagttcaaagataaaattattagcaatctcaagacatgacagcagagcattaaacaagcccagttccttctgcacatggggccttgtgtgaccacacaagccacaggtctatgaagcccatcgcatccctgggctgatgtggcaggcccagaatgaagcccacagtgtcaaaatgggaaaatcagccagggttgattattcagaaaaaaaaaaaaaaagccacagagagattcagaagtagaagttctggatggagggaaagcaaaatgcaaaaaagtgcaatacccacagccagaacgggaagtcctgatctaagccagtccagggagggaagcagcagaaaccccaggagcctgggaatgggaattggacatcctgccgggggagcctgggatttgagaaggagaaatttcaattcccaatggaaatgagaagctaggtaagaaagaaggtaagaccatcttctcagcaatcagaaactagtggaccactatctggggtctctaagctctcaggtgtgaggaatggttaattttttttttttaagtgggatggacctggtggctcacgtctgtattcccagagctttgacatgccgagatgggaggattgcttgaagccaggagctcaagatcagcctgggcaaaacagtgaaaccccatatctacaaaaaattttaaaaattagcctggtatgatggtgcacacctgcagtccaagctacttgagaggctgaggtgggaggatcacttgaacccaaaagatagaggctgcaccagcactttgggaggccgaggcgggcagatcacctgaggtcgggagttcaagaccagcctgaccaacatggagaaaacccatctctactagaaatacaaaattagccgggtgtggtggtgcatgcctgtaatcccagcactcgggagactatggcaggagaatcacttgaacccaggaggcagaggttgcagtgagccaagattgtgccattgcactccagcctgggcaacaagagtgaaaccaaaaaaaaaaaaaaaaaagaaagatagaggctgcagtgagctacgatcacatctctgcaatagagtgaaaccttgtcttaaaaataaattaatgaattaataagttggttttttttttttttttttttttttttttttttgcagagacagagtctcactccgtcgcccaggctggagtgcagtggcacgatctcggctcactgcaacctccgcctcccaggttcaagtgattctcctgcctcagcctcccgagtagctgggactacaggtgcccgccaccacgcccagctaatttttgtatttttagtagagacgaggtttcatcacgttggccaggctggtctcaaactcctgacctcaagtgatctgcccacttcagcctaccaaagtgctgggattacaggcgtgagccaccacacccagccaaataaatttaatttttaaaaaaagaatttaaaaaaatagatattggctcaaaaggaaaaaaactgtagaaatctaaatataatatttaactaaatgtctataaaaccttttaagtattgactttggtattcataaaaaatttaattatattcccattgttggctgctgggtcattaaaaagagaaagaaaaaaattaattacattcaaaaagcaatctaaggcttagcttttctgacttcaagagaattcctaagtatgcacaatgatggccaagaaatcgcagtcaatcgtaaatcaaatatgcttaggggccaaatactttcaaaagcaaaattataaaaatctttctgattctttcataaggaataaaagcacttaatgtggaatgggggagcattttaatatgattgttgcaatatgggatgagtcctcaaaaagcaggagtttttttagaggtctatacagagcctaaaaggccccagggaatggggaaggaacgggattccaagaaacttaattcctctctcagagtgggagcagaaacaaaactcatcccatgtgaattagctgaggctcacggagggctgatgatagggtcagggaaaaagcagggtgggccttcccagggaggagggtggtctcttgctgttatcatcaccccgggggatgagaccagcaagccaggagccttcagaggatgggatgatgggaaggagaactcctggaaaagagtgaagagcacctcccatagatgcagaggagaacaaggtgggagctggtccctcaactgtccacagtcgagagagaccccaaggttctccagaccccatcagacagctctggatgggaacaaggccgggggtggaaacgtatggccgctgtgcaaggtcacttgagaagacctgcataggggttaaatagtggccccaaaaagagacattcaaatcccagtcgctgtgcctgtgcatgtaacgttgtattcataaaaagtctttgcagatgtaattaaaaatcttgagatggggccgggcgtggtggctcatgcctgtaatcccagcactttgggaggctgaagcgggcggatcacttcaggccaggagttcaagaccagcctggccaacatggtaaaactccgtctctactaaaaatacaaaaatctctcgggcatggtggcgggcgcctgtaatcccagctagtcgggagactgaggcagaagaatcatttgaatccaggaggcagaggttgcagtgagctgagattgtgccattgcactccagtctgggcgacagagtgagactccgtgtcaaaaaaaaaaaaaaaaaatcttatgggatcatccagattaaccagctaaatcctaaattcaatgacatatgtgcttgtaagagaccaaaggggagaaatcagggacacagagaagaagaaaaggccatgggaacgtagaaatagagattggagtgaagcagccacaagccaaggaacgctcggagccgccagaagccagaagaggcaaggaaggatcctcccctgaagccttcagagagaccacgaccctgacaacaccttgattttagacttctggcctccagagctgtaagagaataaatttctgtagctttgagccacccagtttgtggtgttttgtagtattttgtatgggttttgttttgttttgttttgttttgtttaagactgagtctctctgtgtcacccagcctggagtgcagtggcgcgatatcggctcactgcagcctccacctgctgggttcaagtgattctcctgcctcagcctccagagtagctgggattacaggcgtacgctaccacgcatggcagattttttgtatttttagtagagatggggtttcaccatgttggccaggctggtcttgaactcctgacctcaagtgatccacccaccttggcctcccaaagtgctgggattacaggtgtgaggcactgcacctggacaatgttgtagtatttttcttatggcaggcctaggaaaggatgacaccctgactttaccatttctaccacaaggccagcaaggaagtcccccaagcaccagggactgccctgagcaaaagagtccatgacatactctcccccacccttctgcatcaggaggaaggctgcacaggtagacaggtgcatgaatctcccgacagccacgtaggagctccattgtcctgaatgagcttactttctattttcccgccagcctttctgcctgtctccttcatgcccacccctccacctcccatccccatcccctgccatgacaaatcactggaggataacttatcctgaaatgcatcattttaaatttttcccaaaaaacttttatggaaggtgaatttaaaaatagtgaaataggtcaggcgaggtggctcacacctgtaatcccagtactttgggaagacaaggcgggcaaatcacttgaggtcaggtgttccagaccacaccctggccaacatggtgaaactccgtctctactaaaaatacaaaaattagctgggcgtggtggcgtgtgcctgtaatcccagctactcaggaggctgaggcaggaagattgcttaagcccaggaggcagagtgagcaaacatcttgccactgcactccagcctgggtgacagaaagagatcctgtctcaaaagaagcaaacaaacaaacaaaaatagtaaaatctctcttagccgaaaagccttctcagaagcctgagttcttgctcagcaaaaccttcgtttaggtctgtgggtttgtcaacgacagcactcatgtgggcattcagggaggtattcctcacttaggccgtggatgcctcagactctaggacctgctggcttcttccctagggcagcagcagcagcgacagaaaggcataaaggcagaagcacacaggcatgtgacaagagaccagggcatggcagtttaagcccagattttgccagtaactcgctgggcaaccttctcctctctggtcctgagaaatagaagagttggaccagggaaggtccaaggtccctttctcagtgaaggctctgagtttctgatttactgcctcagtaaaacagtgccaggtcccagactggaagagcacagctgtgaatttggaaccaaggcctcatccagtttaaggcattctgttgtatccttaattttaaatacaggccaggcacgatggctcacgcctgtaatcccagcactttgggaggccaaggcaggcagatcaccagaggtcaggagttcgagaccagcctggctaacatggtaaaagcctgtctctaccaaaaatacaaaaattagccaggtgtggtggcaggcagctgttgttccagctactagggaggctgaggaaggagaatcgtttgaatctgggaggcagaggttgctgggaggcagaggttgcagtgagccgagatcgtgccactgcactccagccagggcgacagaatgagactctgttccaaaataaacaaaaacaatttaaatacaaacaaacaaaaaccacctccctgtgctaatggggactatctcaacctcacagaaaaacagccagagctcctaattcagcttccagtcttgtgaccatgcatcagtttgcagtgagcttgttatgggttacgttgtgtacccccaacccaaaatttgtttgatgaagtcctaacccccagtccctctgactgtgattatttggagagaggatctttacagaggtaatcaaattaaggtgaggtcattagggtaggccctaatccaatatgactggtttccttaaaaaaaaaaaaaagatgaaatttggggcctggcgcagtggctcaagcctgtaatcgcagcactttgggaggccgaggtgggcagatcatgagatcaggagatcgagaccatcctggctaacacggtgaaaccacgtctctattaaaaatacaaaaaattagccaggcgtggtggtgggcgcctgtagtcccagctactttgggaggctgaggcaggagaatggtgtgaacccgggaggcggaggttgcagagagcagagattgcaccactggactccagcctgggtgatagagcgagattgtgtctcaaaaaaaaaaaaaaaaaaaaaaagagatgaaatttggacacagatacgcattaagagaagacagtatgaagagacagaggaagaaaatggccatccactagccaaggagaaaagccaggcacggtagctcatacctgtaattccagcactttaggaagctgaggtgggaggatctttgagtccaggacttcaagaccagcctgagcaatatagcaagatcccatctctactaaaaaaaaaaaaaatcaaaaaaattagctgggcgtagtggtgcactcaggaggctgaggtaggaggatcacttgagcctcaggagaaggaggctgtagtgagccacgattgtgccactgcactccagcctgagtgacagagtaagaccctatttcaaaaaaaaaaaaaaaagagaagcctggacagatccttccctcacagccctcacagtcctcaggaggaagcaacccccatgacaccttggtttctgacttctggcctcctgaatcacatgagagacaataaattgtccgttgtctaagtcaccttgcctatagcacttcgctaaggcaaccctagcaaactaatccaatgctaaaggtcactgtcacttccaccggggaatttagtgctgggaagaacctccaagagcatctggtccaagcccctcacttcacagatggaagcacccagatctcgccttggccccattctcccacgttccacacactggtgagcccctaatcaccctaggctgtcagatttgagtcgtagctttgcagctcaaccacgaaaatgattattataagcaaaactacagggaaacaagtcagaataccaaagctaataaaaatgcttcaaggacaggccgggcgcggtggctcacgcctgtaatcccagcactttgggaggccgaggcgggcagatcacaaggtcaggagatcgagaccatcttggctaacacggtgaaaccccatcgctactaaaaatacaaaaaattagccaggcatggtggtgggcacctgtagtcccagctactcgggaggctgaggcaggagaatggcgtgaacccaggaggcggaggttgcagtgagccgagatcgcgccactgcactccagcctgggcgacagagcgagactccaactcaaaaaaaaaaaaaaaaatatgcttcgaggacttcccaggtacatcctccgacaaacaactgacgttctctgcccaggtcttgagacatcgagagagagaggtgtgaatactatagctattttcatggtgagacttctacgattattttaaaataatatgtcactgagactttacagactcacattggtcttttacctaaagtcatcctaatcagcaaggcttcaccacatactcaggaaacctcagtcggaccctgtaacagataataacccacacagaaagcctcacacattaaaggcactcaaaaaatcatttgtctaattaaatgatggcaccctacaaattgccctgtgccttccactcccactagagtaggttgggtgttgacccatcaatatgatttcccaggaacttgcttaataaaactattcaaaatataaggggaaaaaagatactgatcatcttaatgctcaacaaaaggttaaataaactacagagcataagtgcagtggacttttatgccatttgctaaatgataaacatcataggactataggaaatatttatgatatcaagcttgtgaaaaaagcaggattcaaaaatatatgctacttgtccttgcaatggtaaaaaaaaaaaaaaaaagtaatatgcaaatcacagaagactggcagataattcctaataatttaaagtagttggggcattcggtgataagagcataggttttcctcctctttctgtaatgttatcttccttttataatttaaatatattttaataaggtataaaaaaaggttgcatacagaaagtaaggctcattgagcttaaacaataagacctaaagtaggtatcaaaacacagtcacgaaacccagggctcctaattttcaacacaagactctcaaacaataaaataaaccctgtgtttatatccacggccacctagatgtttaaaacacccaactctttggaaagccagttgcaattgaaagtttccacgatttgttttaatccatcgtttcccaagaattttcttcacctcattagctcttcaacaggccagctgcagaatgaggttgtctccatgtgatgagaaccaaaggcctaaggaagctttctcccttcctccctcctacccttcttcctacaagcacagggtcctcctccaagcccctggggcctgccttcaccaccatgccagcctctcactctgcgattcatgtctcttccctatcagtttcacaggcagatggttggcgaggcctgggctttgacagaacatctgaaccatgcggggcctacagacccgtggactttcaccacccaccagagactccatccctctgccttcctaaatgctacctggatgctcccaggaaaccataggttcagggcaaagtgtctaagccaaaggctccgttttccctccctacagccccagaaaaggatagaaagtgggactttccacagggcccctgacatgtacccaaagctgccatcagggagccacctggcacttggacattagaatgttgtctgccaaggtgcctgcttctgaggttgagaaggctatgctaagttcttccagaattttctatagccatagtgggcaagtaccttctagtccattttaataccaaaattcattttgtattaattttaacaagcattgattacctagcatgtaggccagctattattattgctctaactccactgctatggttttaatatcccctccaaaactcatgttgtaacttaatccccaatgtaccagtattgagaagtggggcctttaaaagttgattggggctgggcatggtggctcatgcttataattccagcactttgggaggccaaggcagaaggattgcttcagcccaggaatttgaaaccagtctgagcaacatggcaaaaccctgtgtctacaaaaaatacaaaaatttgtcgggcatggtggcacgcgcctgtagttccagctacttgggaggctgagattggatgatggcttgagcccaggaggttgaggctacagcgagccaagatcgtgccactgcatgccagcctgggcacagaatgagaccctatctcaacaaaaaacaaaaagttgactggatcatgagggattcatagattaatgggttatcatgggaggggaactggtggttttatgagaagaggaagagatttgagctagcacacccagcccccagccatttaataccctgctccacttcaagactctgcagagtccccaccagcaagaaggccctcaccaggtgcagccccttgaccttggttttctcagcctccgtaactataaggaataaatttcttttctttataaattactcagtttctggtactgttataagcaacagaaaacaaactaatacacccctcaaaaaatggttagtcaagtaaattgtattagcaaataattcattcttttccccatcttatatttatcaaaaacactgatatagctaccagagcttcagatcagtatgaaataccagggctccaaaactgcgaggctgtcactccagccaaaagtaaagaaaccgaattatcatttgcctttgcttcattcagcatttggaaatattaataattgatcgatgtgatgccagcagccccatcaagcttaggaacccaaagttggaagtcactgctgcagggggtaaagaataaatgacacacactgtccttggctttgagaaacaaggaaaacaataatgtaaatatgtcctcgcaaaacagttaactacataagcagctcccaatccttgtccattgctgttctaacatacatactgatacggtttggctctgtgtcccaactcaaatctcatgtcaaattgtaatccccacgtgttgatggaggagcctggtggaaagtttttggatcaagggggcagccttctcccttgctgttctcatgagatctggttggttgacggagtatagcacctcccacttcagtctctctcctgctgccatgtgaagaaggtgcttgcttcccctttgccttccgccatgattgtaagtttcctgaggcctcacagccatgcttcctgttaagcctatggactgtgagtcaattaaacctcttttcttcataaattactcagtctcaggtagtgttttatagcagtgtgagaacgaactaatacatatactgataaggtttctcagccctaaagaggaatacaatgtatgtatattatccctctggtgaagagagaagacacttaatacgcatttgtcaaataaatgaacggtgactcactttttttttaagacaattaatttttacagggcacactcttaggcaagacttctggtacatgatctcacaacaacatcaaagtccaaaattaatcaagaaagtaagtgcagctgctgttctaggaggctggagagacattgggtgattaggctggcaggagacctagtgggtctagtgggtgctcaccctgagatgatctcctctccctaatgcttattcattctcttctcttgaagaggcttcccatctttgagcctttgctgggcaggattttggttactgtgctgaaatagcgagggggactggtggagtgagggcaagatccttacaggatgtgaaggatgtgggtaggctgaaagaggtagaaattaaccaggagtgaaaaaaaaaaaaaaaacaagcaaaagaaattaaccaggagtggaccgggcatggtggctcacgcctataatcctagtgctttgggaggctgagacaggcagattgcctgagctcaggaggtcaaaaccagtctgggcaacatggtgaaaccccgtctcttctaaaactataaaaaataagctgggcatggtggcatgtgcctgtaatctcagctactggggaggctgagacacaggaattgcttgaacccaggaggtggaggttgcagtgagctgagatcatgccacctttctccagcctgggcaacagagcaagactctgtctccaaaacaaggaaataggaattaaccaggagtgtttggccaaccacatggaaactggccaagccatgtagaaaggagttttagagagcatgcctactgattctactctaattcacctgcaaatccacatccacgcagaccctatggatctaacattgtagccctgaattacataaaatcttgaaacttttttaaaaaaagatttatgtatatttctcacccttgagagaatatcagttaccgaagagttaaaaatatctcttacttttttctacccaccacaaaacttacttccttaaggataaaaacctcgggaactatattagtctgaaaataatgaaagttttagggcaggggtgtggcctgctcaaaggaggggttggggaagaatctggacacagtgggcaacagggatgggggcaagaaaagattggagctgaggctgggtggggtggctcacgcctgtaatcccagcactttgggaggccgagggtgggtggatcacctgaggtcaggagttccagaccagcctgaccaatacagtgaaatcctgtctctactaaaaatacgaaaattttttgtattggtgacatgtgcctgtaatcccagctactcgagaggctgagacaggagaattgcttgaacccaggagttggaggttgcagtgagccgagatcacgccattgcactccagcctggatgacagagcgagactctgtctcaaaaaaaaaaaaaaaaaaagactggagttgagaaatctgttggtggagaatgcaaatcacaggtggaagacaagaagcactaccctcctggtgacagaaaatgtgccccaatgttaggcagtggagtacataacatcatacctgttttcattcccagaataggacagaaacttactataactgagtcaatcaaacatctttgagtttccactgcaccaggtctcagagcctttcttatgaaaagaagctcactaggtccaatcttacctggccccctggggatactgtggggcttgatagggtaaccatctgttctggtttactcaggactgaggggtttccagggatgtgggacttttggtgttaactggaacagtcctgggcaaacaaaaatgaggtggtcactctacaccacattgcacacgaaagaaagccaaagctcaggttactaccttgctactcaatgtgtagtccctgggcttgcaaggtaggcaccacgaaggagcctgttaaagatgcaaaatctagcagggtgtaatggctcatgcttataatcccagcactttcggaggctgaggtaaaaggattgcttgagcctgggaggcggaggtttcagtgagctatgatcacgtcactgcactctagcctgggcaacagagcaagaccctgtctcaaaaaaaaaaaaaaaaaaaaaaaaaagatgcagaatctcggctaggtgtagtggcttgcgcgtataatcccagtgctttgggaggctgaggtgggttgatcacttgagatcaggagttcgagactggtctggccaacatggtgaaacctcatctctactaaaactacaaaaattaaccaggtgtggtggcaggagcctgtaaccccagctactcaggaggctgaggcaggagaattgcttaaacctagggggcagaggttgcagtgagccaaaattgcaccactgcactccagtctgggcagcagagtgagactctgtctcaaaaaaaaaaaaaagatgtagaatctcaaatctcaagccccaccttgatctgatgaatgagaacccacatttcaacctgattcctggggacctgtgcccatcgggtgtgaggaacatagggttattagataaaatttgttccttcagcatccatgagtctgtgcatgtgctattttattttgactgtttcaatatcagaagaaaccatccaaaattggtgccaagtgaattatagctttttatgaccatttacaacaccacactgcaagaaggctaaagagtgattttgtttcctctcttcattctcttctccagatttcaagaaacagaatgcagcagtccagaacattttgactctagtggttgctttgccaggatttctcaacctgagcgccactggcattctgcgcggcacattccttgctgtggggctgtcctgtgcatggtaggatgtttggcagcatccctggcctctgcctactagatgcacctgttattgcacctcctcccagttgtgacagccaaaaatgtctccagacattgcccgatgtctcctaaggggccaaacagcccccagtcaagaaccactggcttagacaaagaagacatgctcatggaaataagagccaaaagcagacatgagggagcttgtgcttgccaggagtttgttaaagtcttgaaaactatgttcggcatggcacggtggctcacgtctgtaatcctagcactttgggaggccaaagagggaggatcgcttgagcccaggagtttgaaaccagtctgggcaacatagggaaaccctgtctctacataaaattagaaaattagccgggcgtggtggcacacacgtgtggtcccagctactcaacaggctgtggcaggagaatcgcttgatccctggaggtggaggctgcagtgagctgaggtcacaccactgcactccagcttgggtgacagagcgaggccctgtccaaaaaaaagaaaaaaaaaaaaaaccctgaaaacaaggccacactgatacccaacaggcttctggagagaaccagctgggtgacctgcaggcccaccccatgtcgaaggggaagctgtctgccagtgacactaatgaagacaagcagtccccagttgccagggctcaagccgtctgccccaccacttacagctgctctttgttatttcagccacagagtgcaagaaagaccttttgccgttttattagtgtgccatgctgaacgatattagaggtttcctagcagcattgttaaaaaaaaaaaaaaaaaaaaaagactgagtagttgacgttagaatcaccagagtgaaccatctggctcagtcccccaccatcatcacatgaggcagaaggccataccagatggggcacttgcagagctggtccctgctgtgagcaggtgctgtttagtgtctgggtagccccaggaggcttatggactgagaaaccattcccatctctgcctccgggctggcctgggccacacccttcctcaaggcatgtaaaggaggttaactactccatttgtcaattttaagatgcactttctcctccctgctcccacccccagttcagcatcttggaaatctggattcatcttacagcaataggacaatggccatcagacaggtataaggtgggatgcagccatcagggcctgacgacgcgccaatgtcaaaagcacctgcaaaaaactctcaggatagtccagaaggtttggagggaaatccaagaggagtgcccttttggcccataaaagactgatggtcatagagaacgggcaaggaggcagggaattggatgtcttcagaaacattcctgaaggcgcagagtgggccaaccctactctgcatgagtactactcagagagtggtgcctggaccagcaacatcagcatcacctggcagctggcaggaaataaatgcacattctcgagctccatgccagacctactgagtcagaatctctgggagtgggcccagcgccgtggctcacgcctgtaatcccagcagtttgtgaggccaaggcgggcggatcacttgaggtcgggagtttgagaccagcctggccaaaatggtgaaacctcgcctctacaaaaatacaaaaattagccaggtatgatggcgggtgcctgttatcccagctattcaggaggctgaggtgggagaattgcttgaacccgggaggcagaggttgcactgagccaaggtcgcaccactgcactccagcctgggcaacagagaaagactctgtctgagaaagagacaaagagagacagagaaagagacagagaaagagagagaaagagacagaaagagagagaaagagacaaagagagagaggaagagacagagagagagaaagagacaaacagagagaaagagacaaagagagagagagagagaagagaaagagaaagagagaaagaaaaagaaaagagaaagaaagaaaagagaaagaaagaaagaaagagagagaaagagagagagagaaagaaagaaagaaagaaagaaagaaagaaagaaagaaagaaagaaagagaaagaaagaaagagaaagaaagaaagaaaataaatttctggaactggtccagcaatctgtgtctcaggccctccaggatgttccgatgtaggctcgagatgagaagtgctgctctacatatttgacttaaatcaacgaacttggcttaaatcgatattagcaacaattattagcaacaatggcctttagttcttttaaggaatcttttaagaaatgttacatcatggatactgtagacaaagacgataatatatgaaaaaatactatctcaagtactctgacttgaaaagtgatagagaagcatcagactcaaatatgagaaagtttgaggaagcgattcctcttctaaatattatatttcctttatatgcatgcaaaatgtatatttatatgtatgcatagatgtatagttttcttcatgagtatgcacagcacataataaaactaagtctaaaaatttctttttttttttttttgagacagtgtctcgctctgttacccaggctggagtgcggcagcatgatctcagctcactgcaacctctgcctcctgggttcaagtgattctcctgcctcagccccctgagtagctgggattacaggcacccagcaccatgcctggctagtttttgtacagatggggtttcatcacgttagccaggcttgtctcaaactcctgacctccagtgatccgcctgcctcggcctcccaaactgctgggattacaggtgtgagccactacatctgaccataaaagagctcttttaataagtaaaaattaaatattctaagtataagcaagtattcgagttttgaactatacactttttctttcttgacggttcacaaaatactgcatccttgggttggcagagtcttaggttccataaaatgtggaattctactgtgtaactttgcctcacctaacctaactcttttgtgatacagtttaaaccttctcaacaaggccacattgcagctatctacatgatagtgtgttccgtactcaaagatcattaatcggccttttctcagatttattttcccccacttggctcttcctctgaccctacggtaggtagtcccatttcctaatgctctcatcacggtggcttctttctgcattctctccaactaatcgatgctcctctccaattccagcatgtctaaaacaaaatatgggataagtggctgggctaagtttgacatctggaccacagctgtgcactgctggaagagggtggcttccacccatgacaatgaactgacacagagcatctgttagggcctgggaatcagaaaccagcctctctgttgtacctaggaccccagggtcctttttttatttttatttttattttctgaggcagagtctcactctgttgcccaggctggagagcagcggtgcagtcttggctcactgcaaccccgcatcccgggttcaagcaattctcctgcctcagccacccgagtagctgggactacaggcacacaccaccacgcccggctaatttcttttcgtattttttgtagagacggggttttgccatgttggccaggctggtcttgaactcctggcctcaagcaatccacccctcctcagcctccaaaagtgctgagattacaggcattgagcccctggccccccagggttcttaagtcatgaaaacagagaaagtgataagacatccacatgataagcagccccaattcttcctggcagtcagatttctttctcttcttgtatgccttctttgggcctgagcgctgagcttcctgcatgatcttacaggaattgactagacactaaaataattgctttgcagcaagatagagccaatccagagggaatcaagacatgagtctggtggttgacatcacgcaagtttatggagggagctatgtgtttcacagagcgacaatggctcagcccgccagcctggcctcctgaagccagcgccagcctggaaggagagaccgtcccttctccctcttcgggcatcagatgataagaaagtcctgctgccaggatgaacttcaggaacttgaggatcagtaagatggtggctcctgcacaacggggttgcttttaaacagaggtgatcattaaacattcaccgaatgaaggagtcatggataaggatgtggatcttgggatcagcgtgtgaaaacaaataacttgtaggtatttcatttatttgttttcaatggtaggggggcagggaaaggggttgtggtgtttgtttggtctgtcttccctatgagcatgtcagctccagagtaggaagacaatggtgatatcgttcagcctggtatatccagcacctaaagaaataaatccagagtaggcactcaataaataaatttgccaacttcgccagtgaatttattggttcaaagatgtccctctctcttagaccagagagtctccaatggctagcttggggataggaatggaaaggacaggggagaggtctcaagacctatttattttattttatcttatcttattttattttattttattttattttttggagacagggtctcactctgctgcccaggctggactgcagtggtgtgctcacagctcactgcagcctccacctcatgggctcagtcaatcctcccacttcagcctccctagtagctgggactacaggcatgcaccaccacacccagctaatttttgtattttttgtagagatggggtttcatcatgttgcccagggtggtgaaactcctgggctcaagcaatccactggcctcagcctcctaaagtgctgggaatacaggcatgagccaccatgcctgacccatctcaagacctttaaaaaactacatataatagctaatgttttaccatgctcaaagcaatgtttgtgcacaaaagtgtaaagtgcacaaagcccgaataacaggcctgggaacacttggtggcaggaggccacaaatcccttaaatgtcaaggaagaggcacagcagagcgtcagcttctctgagtccaaggctgaaccacaacatcacccaccagtggaagcaccaccgctttccaaacctgacctgtaacagggactctactgcccatcgattaaaagtgtggtgtctttttccagagaattgctacccagtagctttagctttgcctctgaggtctcatcaatcctttccctcttatgtaaaagcagcattcaggtcctctccgcaactcttccctccttgcacctaaaaatctgtttttccaaccgttcctcctttgaccaagcccaggccctcaccacccactaggtctcctctctcagctctccactctcaacacgctctcacagagtgtgctgaggcttgagtgccctgacgagaacgtgaagccttgggcctccctgcttcctgtgggcacaatggctctgtctacgcacagggctcattcttcctactttgtgcctcatcctccttctccagtttggaaaataccaaaatgaacaaaggagaaagaaaagtcacccataacccaccattccctctctcccttcctgccttccttccgtccttcccttcctccctcccttcttccttccttcctgtttttatgagggatataaggtaaaaagtaggcttggtgtgatggcttatgcctataatcccagcactttgggagaccaatgcagggggattgcttgagttcaggagttcaagaccagcctgggcaatatagtgagacccctgcctctacaaaaaaaaaatgtttaaaaaactagccaagcatgatggcatgtgcctgtagtcccagctacttgggagactgaggcaggaggatcacttgagcccaggaggtggaggctgcagtgagcagagatcacaccactgcactccaggttaggcaacagagcaagatcttgtctcaaaaagtaaaattaaattaaattaaattaaaattgaaatgaagtaaaatcctcctccttctatcttcaccaacagaggtaaccactgcaaacagcttggatagttccttctaaaatgttttactgtcatatgcaaacatatatagatatagatgtatacacacatacatacacatacatatacatacgtttatatctatataaatacacccaaatgtatgcacacatatacacatataacttctaattatttagttacatgtatttctgtatatgtacttaaagaaatgtaaatttataagtatagataaaattatgtgagctacaattacattaattatataattactaaattatactatcatcttttattacatagatcttactctggaacttgtctttttcacttgagtggcatatcatagatactttcccaaggggcttcacaccactctccctcttccttttttgtcgtgtctgtggtgctccatttggagctgggctgtgttaaaattggccagtcccctcccgaaggactttgaagatgtttttaatcttttgcgttgtctgatgttctaacaatgattctttttttttttttttttttttgagatggagtcttgctctgtcacccaggctggagtgcagtggcgtgatctcggctcactgcaacctccgcctcccaggcccaagcaatcctcctgcctcagcctcccaagtagctgggattacaggcacctgccaccacacccaactaatttttgtatttttagtagagacagggtttcaccatgttggccaggctggtcttgaactcctaacctcaagtgattcacccacctcagcctcccaaagtgctgggattacagatgtgagccactgtgcccggccaatttttttttttttttttaatagagatgaggtctcttttcattgcccaggctggtctcaaactcttgggctcaagcgatcctctcacctcggcctcccagagtgctgggattgttggtatgagccaccgattccagcctctaacgactattcttaggcacctatctttaagcaccaaggaaggtatttctacaggacccattccaagaaatgcaaactgggccatagggtgtgtgcatgtttcattttgatagatattgccaaattacactcctgaaagcgttctccaaatttcacttccattaccagtgacttggaattcttttttccccccaaatctgataggtaaaaaatagcacctcactggtatcttcccccagtggttgaggccctcctgtgtgctaatgcaccagccatatcctcagaaaggcaggtggaacggtggttcagcacaggagccccgctgtccaacggccaggattctagcatacttctgcctgttattaactagtacctccatttcatctacaaaatgggcaaactcatagtgctgatgtgatgtatgaagggtacgtgtaaagctcttagcacagaatctttgccccattctaaatggaagcaagcccttggaaatctacattctctttcttttttttttttttttttttttgagacggagtcttgctctgtcacccaggctggagtgtagtggcgtgatctcggctcactacaagctccacctcccgggttcatgccattctcctgcctcagcctcctgagtagctgggactacaggcgcccgccaccatgcccggctaattttttgtgtgtgtttttagtagagatgaggtttcaccgtgttagccaggatggtctcaatctcctgacctcgtgatctgcccaccttggcctcccaaagggctgagattacaggcttgcgccaccgtgcccggccagaattctacattctctacagaacccacctctctctcaactctcccaaccaccaatttcacttctgtgtcctccactcttctttgcctttctctccaattcgcagggccttttgctctcctccataatccttttgatcctcctgaccacactctttttcctcactatggcaacccactgcacatacctttccctctgttggaacccacacctcactgggctctagcccccgtgggcagatcttgagcccacctagcttgcccaagcattatggtgaatgccttgctaaaatcccaacttgccatgctcatgacattcaccccatctaccccatctacctgccaactaagccagcagagaaaataaatgatcgagcctccacagcttagcctgcacttcaataaataaagatgtgcaatgagatttggacctgttgccatccaattgctaacctccatccccaaatccagagctgagaagcaaaagacaagacaattagtcctggaacaggctctgctggccagcagaagaggtcagcagtggtattgagcagtaccaaagctgctttatgataattcttcagctgggtacaatgacctttcattccatgtttatttggaaatgacctttaagcagcaatcatccaaaattaaatgctccaaaggaataaattagataatgcagatgtcccccagtggtcagttaaggaatacagtggaaaataaaagcagctctgcccggggatgccacgggctagtctgtccattagactaataagcgaatacagagttctcgcaacctctgtcaatcagaaaattgagaacctgaagccagagtgacctagacatgattattttcaaaattgaacccaaactagctgatatttcactttttgattctgcctggagcacaggtaactgagttacttgaatgcccaagaattgatttcgcatctcagggagaaagaatcccgaagatttgggttcagtggcaacttggtaagctccacgtgccccatcccagcctcattccaatggaagacatcattcatttgtgctgactcattatgagcatctaccacacactgggttctttgctaagtgctggagaaaattcagcccctcaaggtcaaagacagaggcaggcaactgagcttttgggcctgcaggaggcacggccctctccaccatgggaacatctcatttctgttctcattttctactctgcaggctctgttctttttttcccactcaatatcagtttatccattttcctctttcttgcttatatttaatttgaccaatgatggcactcccagatagcaccaatgggtgatgcttggaacttaacaaatcattcttcctaaagtagaaagcatctgaaaagagaacttcagcaccaaggcctttggcctcctctgccacctgctcagtgaatctttttttttttttttttttttttgagacggagtctcgctgtgtcactcaggctggagtgcagtggcgtgatctcagctcactcctgggttcacgccattctcctgcctcagcctcccaagtagctgggactacaggtgcccaccaccatgcccagctaatttttcctatttttagtagagatggggttttaccgtattagccaagatggtctccatctcctgacctcgtgatctgcccacctcggcctcccaaagtgctgggattacaggcgtgagccaccacacccagccaactcagtgaatcttaaaatcacttggatcacaatcccagggcaaggatctctttcctaccctaggggatccactggagggatccatgagaggagatccgaagagacagggaggaaagagactgctttcctcccacaaaagcagtttccacaacctcccctggtcacctcaactggcccataacacctatcactgctcccaaagcaaaggctgccataccaaaggccttacattgggccaggcatgatggctcacacctgtaatcccagcgcttcaagaggctgaggcggggggatcacctgaggtcaggagttcgagaccagactgaccaacatggcgaaaccctgtctctattaaaaatacaaaagttagccgggtgtggcggtgggcacctgtaatcccagctacttgggaggctgaggcaggataattgcttgaacctgggaggtggaggttgcagtgagccgagatcgtgccactgcactccagcctgggcaacagagcaagactctgtctcagaaaaaaaaaaaaaaaaggccttacatggggcagatatgaggtcagagcccaatccctgctgccaaggacagtctgatttcacctccagctaccttaggaacagcagtgggaaggcagggcttcaggagacaacctccagaggcccagccaggcagcgaaggggatggaaatgaaactatagcatgtgcagtggtgggaacactgcctggaaatcccaaccccagttcagatttgaagcttcactaactcactgagccaagtcacgtcaccctctgcttcttataatgaatggaacccgagtgagtcctaagctgcaaaaaatctgtgatcatagtatcccccaaaattgaaaacagactcaaatcaaacaaatccttgtacataaatgttcatgccagtactattcacaacaggcacaaggtagaagcaacccaaatgtccatcaactgatgaatggatacacacaatggggtctatccatacaatagaatattatcattcagccatgaaaaggcatgaagtgctgatccatgccacaatgcagatgaacctccagaacattatgctcagtgaaagaagccagacaccaaacaccacatattgtatgattccatttgtaagaaatagccagaatagggaactctgcagaaagagaaagcagattgggctgggtgcggtggctcaatcctgtaatcccagcactttggggggccaagatgggtggatcaccgaaggtcagaagttcaagaccagcccagccaacatgatgaaaccccatctctacaaaaatacaaaaattagctgggcatgatggcaggtgcctgtaatcccagctattcgggaggctgaggcagaagaatcgcttgaacccaggaggtggaggttgcagtgagccaagatcatggcattgcactccagcctgggtgacagagtgagactcttctcaaaaaaaaaaaaaaaaaaaaaaaaagagagaaagcagattgtggttgtcaggggctgccagagtggggaataggtaatgactgttttatgggtatagggttttattttggagtgactaaaatttttttggaaagacatagaatttgtacttgtagaacattgcaaatatactaaatgccactgaattgttcaattaaaatggttacttttatgttatgtgaatttcaccttaatttttgtctttttttcctttttgtggagaatgggatctcgctatattgcccaggtaagtctcaaactcctgggctcaagctatcctcccgcctctgcctccctaaaagctgggattacaggcatgagccaccatgcccggcctcaccttaatttattattattaatttattaatttattttagacacagggtctggctccgtcatccaggctagaatgcagtggtgcaatcatagctcgttgcagccttaactcctggactcaaggttataggcatgagccacggaccctgcccccttacttcattttttttttaagtctggtgagtaggcttacaatagctggctccgactgggtttctgcagaagcctcacctgggaagggtcgtaagaagggccactccctctatttctattctggaacccctgacgccactttttttccccaaacatagctaaattaagctcttttctatttctctagcagaattatatgtctatttgtttactatctgcccaaaaaggctaactccaagagggtagtgatttgtctggttcaacgtaacaccccactgtctagccatgggtgggcgctcaataaatatttgtgaatgaataagtgaatgaaactatgcaggtgatcctgtttacctttttttctttttttaaaaaataaaagctataaatgtgttggtggggatgcgaaatgatgtagctgctatggaaaactcgatggagatttctcaaaaaattaaacatagaattgccatatgatccagcaatcccacttctggatatacccccaaaagaattgaaaacaggatctcaaagagatatttgcacacctttgttcgttgcagcattattcacaatagccaagaggtagaagcgactatatgtccatccatggatgaatggataaagagaatgtggtctgtgcttacaacagcgtcttagccttaaaaaggaggaaaatccatcttatgctacaccatggaaaaaccttgagaacattatgcgaagtgcaataagccagtcacagaagaacaaataccacacgacgcaccgcttatatcgaggcatccaaagcagtcaagtttgtagaaacaaagtagaatggtgattgctaggggctggggaagagggggaaaaggggagttatttaacggatatagagtttcagtttcgtaatataaaacatcctagagatcttttgcacatgatgtgcatatagttaccattatggtactacatacttaaaaatagttacgatggtaaattctacattatgtgtttttacaattttatgaagctatagacacacgtatacatgaatgtataattatacatctttaatttttttgtgttcttaaaccagcctgtgagagggtagctgaacccgtgagagctctgctgcctggttttgagtagggactatcctggtgggtgaggctttggacagcaatgcccttgaggagagctgggctccatatcctgtctccaggaactcatcagcacagattggaaaagtttatatggctagatgaagttgcagggggaccatctgaataggctcatgaagcaggagtcattaacaagaaaagtcagctcaagcgctctttgccaagaactggctgtacaaaactcagtccagaaaatatcaaccttaattacaaagtgggtctctcctggagggcagtgctcctcccccgaccccaagaactgggttggagccatggggggcagggtgggtgctaaactgcactagttgaaacttttttttttttttaatggaagcaagtttattaagaaagtaaaggaataaagattggctactccataggcagagcagcctgaaacttccaaagaaagggagaaagaaggagtgaactgggccctcctaaacgctagtgcaagatttggtatactacaactcacaggccaagtctggttatgcctgtttttataaataaagttttattggggctgggcactgtggctcactcctgtaatcccagcactttgggaggccaaggcggacagatcacttgaggtcaggagtttgagaccagcctggccaacgtggggaaaccccgtctctactaaaaatataaaaattagctaggcatggtggcgggcacctgtaatcccagctactagggagactgaggcaggagaattgcttgaacccgggaggcagagatttcagtgagccgagatggcgccactgcactccagcctgggtgacagagcgagactccaactcaaaaaaaaaaaaaaagttttatgggaacctagttatggcccatcattgatgcattgatttatcatctatggctgtttcttctacaatagagctgagtagttgtgacagaagctgtatagcccacaaagcagaagatatttactctccgaccatttacagaagaagtttgccaacccccgatctagggaaagaaaacggtgtcctgtgtagggaaggacataatgcttcgctccttattcaagggccagtaaatcccgttcccttttgttttctcctgctgttctgcatcctagcgcaatcaattcccaattgtgtatgaagtgccacggaaaatccccagcggcggttaatgcaaaagcatttataattggtttcagatgctaataggaatcatctatctctcactacttcccccagcagatttaccttcttaatcatgtgtgacttaggctgatgtcaagatgcatctgcactcccagagcaccccctacacccaccagctgcaaggcagaaaggcaggggtgaatgcagaagtgatctaaagtggcgggcgcggggggagggcgcacaccaaaaaaaacgggtggcattaccctgtgaggaagcacagggcccagccaaagctgcaatacaaataagaaataagggttctctctagaacggttactcttaaactgctctaccattttcacggcctctctctgtccatcatggcagctcctggggttgttgcttgcagagctgtgtagcctgctgatagcattatggtcagtgggcagaccaggggaggactctctaggatcccccagctggtgccagggagaggcatgggaggggttgaaactaactctccatccaaagactctaaagatgggtagggtcaatcggcctctcaggagatgctgaagactacttcttatgggttgtgggccatggcctcagaatttaggaagtttacaaacaaggcagagagaccacagaacatcaaatactactacaagagctaatcaaagaaagagagagagaaatggctgggcgcagtagctcaggcctataatcccagcactttgggaggctgaggtagatgaatagcttcagcccaggagttcaagactagcctgggcaacatggcaagactctgtttctactaaaaatacaaaaattagccagacctggtgtcacacacctgtagtcccagctacttgggacgctgaggtgggaagatcaacttgagcccaggagatcaaggatgcagttagctgtgatcacgctactgcactccagcatgggtgacagagcaagaccctatctcaaaaaaaaaaaaaaaaaaaaaaagagagagagagagagaaagagggtaaacagaagacctgtgccaatgcagtcaacaagaaattgccaactaagtcacctcaaaccttttatagaacaaaagaaggtataagtatttctttctcataagggccaagaaagaaatatagacacatacaatgaattcagaggtaggagagatggctccagccagactggccccagagggctttctagagaagcaagcacatggcccagatctcagggtgagcaagacgcctcctgtggccactcaagatggtcagagtccatcaaccctgtcacaggttccaaagcacccctgtcagaagttgttctgcatggaccctccagcctcttctccatcagagctttctaggccaaagagtaggagcagcagccatagaaccagtcaaggagctctgagcctcctccaggcccagctctgtacaggggggttttttggttaatcctcaaataaccccatagtgtaagtttaacccctattcctagaacaatacccagcatataataagctctccgggaatcagtatttgtttattcattaactatatttttattatgttgaataactccccatcttacagatggggaaggggtagaattgctagatttagcaaacaaacaaaaaaacaggacacttcattaaatttaaatttaagataaataacaatattttagtataagcattggaacactgggtgtcctgtattttacttagtaaccctaggaagcaggggatagggtgaggagctgcagctcaaagaggttttgaatttgcctgaggtcatcatgggtaggaaatgccaaaaacaaattcaagccctggtagtcaagctctagagcaagtctgatgggcctctacactgtcccaggctgcttctcccttcttgccactcccacagccctttgactacaacactttgactacctcactcttgcaatttaacacattgcaagaaggtagttgacagtgcacatgttggtttcctcccttagaagataaactctaattctctgtaactgcttgggatggaggcagctaattgtctttgggaatctactctcttcatcatcctccattaaagacactccagttcttagctgggcacatggctactgggataaagactgtattttccagcatcccttgtagctacgcatggtcatgtgactaagcgctaaccaggaagtatcctaaaaggaggaagcatgcccttctctgcttcctgtttcctgctggctgggatgcggaataacggctgctgctatagcagcccctcttggaccacaagggaccttgggggtgaaagcaacccctaccagagcaataaaacaggagaatcctgggtcactaacagtatttaaagcaatatcagccctggactacttgtaggcttttttctaacttaagccactattatttggggctttctattacttggagttgaatataattgtaagttatgcatgacctcagcacctagagtagcctgaaagggattcagggaaggtttgctgaaaggataccatttcataaccgaacagtatcctgcattccagattctggcccaaaaactcccacctccccctaacctcatataaaacctcaattaaaatgcacggctagaaacctcacaaaatccttgacctaaatatatctgtatgtatgtgctttgatattcctgtgtggaaggggaagatggctggaaaaagtattttctttctcttaggtatcccccagacacagatttcaatagtggtgcaaggctgacctaagagttattaatgatatgctattggactaaatgagctagaatcacagcaacatggaaaatcaagacttcctgctattatgtaaatgtaccgccatttgggaaaataactcagtatgagattcattataaataatgttttcatcccaaccttcatggcttttggaaacttcaatatatgacccaatttattaactaaaacaagatccctctccaatccttttaaatgacttctataaaattttaagcttagatcatccatgcaaatatcttacattattagctatgcaaatattttgtattatttttaaaagcccaaagcttctgaaaaactctcttaatcctggatgtatttcctgatcctacaatcattttatagtataaagacactactggggctgggggaagtggctcacacctgtaatcccaacactttgggaggccaaggcaggcagatcacttgaggtcaggagttcgcaaccagcctggccaacatggtgaaaccccaactctactaaaaatataaaaattagccaggcgtggtggtgggcacctgtagtcccagctacttgggaggctgaggcaggagaatcgcttgaacccaggaggtggaggttgcagtgaaccgagattgtgccactgcactccagcctgggcaacaaagcgagactgtcaaaaacaaaaacaaaaacaaaacaaacaaacaaacaaaagacactattggattaaaggtatacatagtaaatatatagaaatcaatgtaacgtgtacatccatcagaaattttacttgcatttaataaaaactaattctgacttattgaaatggaaataaaatttattaaatggttgagtcagttgcagacctctcaggaggaacagaacgaccacacagcggtaaacagtcagatgaaatcccataattgcaccatagaactaacccagtgaggacagtggtgttgcaaccctgagggtgtcagtgcttcaggctgtgtcagtactgagacccctcgatactgtttccagaatcattgccatgtgtcttccagatttggacacaaccactgcttctgccaccctcacaaaaatgcattattattattattattattattattattttggagatggagtctccctctgtcacccaggctggagtgcagtggcacgatctcagctcactggaacctctgcctcctggcttcaagtgattctcctgcctcagcctcccaggtacctgggattacaggcacccgccaccaagcctggctaatttttgtatttttagtagagacgtttttccgtgtggtccaggctggtctcaaactcctgacctcaggtgatccaccctcctcagcctcctaaagtgctaggattacaggtatgagccactgcacctggcccaggaatagattccttgtggccgctgcttctttctgtcaccagcttctcatccaaagccatgtgcaggtgcatgtgatttgcatttctaagctcatgcatcccggtccatttgcaaaggaggctgggaagtctgatacctggttattccagaggtgagctctatctcataagataggaaattccccataagatgattcctatggtgggcaaccaaaaaagacaaatattcactacaatgcaatttgactgtcgttttgtcatgatggcaatgtgatccaaactactgcccctgtgttttccctaaggattcctaattcctaaacaccctgaactggctttatgaacactttattttttccacaattcgagtttcctctagttcgtgggttttcgttctctcttttttttttttttccttgagatggagtctcactctgtcacacaggctagagtgcagtggcacgatctaggctcgctgcaacctccactttccaggttcaagccattctcctgcctcagcctcccgagtagctgggattacaggtacccaccaccacgcccagctaatctttgtatttttagtagaaatggggttttgccatgttggccaggttggtctcgaactcctgacctcaggtgatctgcccacctcggcctcccaaagtgctgggattataggcttgagccactgcacccggcaccttcaaatttgtttccaattaattattcccagctccgtctacagaatagggacaaattaaaaacaaccttaatgtccaccaattcattaaaacaaattagggacaattacaaagttatttgtataccaagcggaagatataaatacatacctggttattgtaatgactgcaaatttaaaaaattagtgaggcattgccaaaacagtaaagcaggaataattgatttaaagtgagttgggaatttttttttaactatccccatctcctcatctactgaacattaagattcttatattttattgttttttccctactgttatacatttttggttattttcctattgcaaaagcaatgtgtgcatatacagacagcaagattaatataaaaatgtctgtaatctcaccacccagtgacaagtagccttatctccaggacagtagctttgagcataggctttggggttaaactgccacatctgggttgggcgtggtggctcacacctctaagcgcagcactttgggaggccaaggcaggcaaatcacctgagttcaggaattcaaccccaaaatatataacagtagggagaaaacattaaaatacaagaatctaaattttgagtagatgagatggggatagttaaaaaaaaattccaactcactttaaatcaattattcctgctttactgttttggcactgcctcactaatttttaaaatttgcaaagttgttacaataaccaggtatgtatttacatctcacacttggtatacagattactttgtaacatagtgaatacttgtctctaccaaaaatacaagtattagctgggtgtggtagcacaggcctgtagtcccagttactcgggaggctgaggcaggagaatcgcttgaacccaggaggtggaagttgcagtgagccgagattgtaccactgcactccagcctggacaacaaagtgagactccatctcaaaacaaataaaaaataaaaaacaaaaatgccacatctaaaccctcatgaccttagaaaacttcctccatctctctcccctcggtttttccatttatgaaaaggggatgctaatgtcccttcataaggttgttgtacagactgaatgaaataaggtcgactgagcccttagcatacctggtgcacagtgagcttctagaaacactagctgttatttcagatcctgtccttgcattggtctagctattttcacaaaaatggcacatttcatcaaacctctattactggacatcgaggtggtctctaaatgtaataattactaacagcacagagcaataattatttgcaaaaaaaaaagttttttatcagaaattttaagatagggaggcattcgttaaaaagaacaacttctaaaagtcaaaaatcctttttgaaacatttataaaatattatgaaattgtccccacctattgattcaaaggtgtaccacatataacacccatacacagtgctggaagaaaataattgtctcaatcaaagtgcttttgaccacatgccctgtgatcagtccccagagtggtgtcacattgtctctgatttgactcgcagcctgctggacagagacacggctttacaaggagcttaacggttgaagtcagatctgcgggaaactcgtccagtgttgcctggcaatactgctgtcaggtgggcagtccctttgggtcctgcagttacctgctggccagataccagcccagtgctagcaaatgccaacagcagcccacacagatggaccacaggggatgagccaacagcgggtgtgggcgagggtgcaacaaacgaatcactgactggagatgcaaacctcagcccagcagctgccacatctgggccaggcacggtggctcaagcctgtaatcccaccactttggggggccgaggcaggaggatcacctgaggtcaggagttcaagaccagcttggccaacatggtgaaaccccatctctaccaaaaatacaaaaatcagctgggcgtggtaacacatcctgtaatcccagctacttgggaggctgaggcaggagaatcgcttgaacctgggaggcaaaagttgcagtgagctgagactgtgccattgcacttcagcctgggcaacagagtgagactccgcatggcaatagagcaaagcacagttgactcggaaggctcttgcttgctgtctgtaccccttgaagaccactgttatctagaagtggaggtaggaggagaatgaaaaataacaaaattctggaagctcatgtttatgtctaaatttctctcccctcctctctttggctcctttccagcctagggcacattttcttagtgacagctgatcaggaggatgaagttgacatggcgccaggaccgtctgttggccacctccccacaatgcactattctcctcttcctgcaccacaccctcctccagaagcacctccagactctcagagccctggggtcttgtcctgcttcaactctgcttcctggaaccctagttctgttttcaggtagcgttggagtccatccattagcctggaagtaattacattccctcttctgggataaccttgactctctcttgcgctccttcagtgaccagggcaagtaggcaatagcataggaaaagaccttgggcctcagacagcatagaccttaagtgtccccgccattaaaaacaaaaggtaggctggacacagtggctcacgcttgtaatcccagcactttgggaggctgaggtgggcggatcacttgaggtcaggagtttgagaccagcctggccaacatggtaaaaccccatctctactaaaaatacaaaaattagctgggtgtggtggcgggcacctataatcccagctacccaggaggctgaggcaggagaattgcttgaacccgggaggtggaggttgcaatgagccaagattgcaccgctgtactccagcctgggctacagagtgagactttgtctcaaacaaacaaaaacaaaaacaaaaacgaaaaggtaactctatgaggtgacggacgtgttcattaagttgattgtggtaatcatttcacaatgcatgcaaaaagcaaatcatcacattatacaccttaaatatatacaagttttatttgttagtgacacttcaataaagcttagggaaaaaagaactggggtttcacaaagtgactccaattatgcgttaatcagctgtgagaacttaagaggttactgacctcttcacagtggaggtgggaagttattcctcccaggaagatagctttctgtgttctttgaggattaaatgggactctgccccccgagtactatcatcaggccaagcgcagagaaggcacacgggaaatacctgcatccctactcctttacccaatctctgcacacttcagagttgagaatctgcaaagagctcattctgccaggtaggatggtgaaacatatgacttcaaatgctactttagattatcgctttgcctacaatgttgagaaagcaaagacgggctgctatcctacctcgcattttacaatatttaagccaccttgcacagcttcctgccgccctgtcactgcttaattaaacagaagtggccacgcatccaaatcctttagaggtaaaccctttcaacagctgctgctgctttgatcactcctgggataactttgaagaatgttctgtcaaagggagcaatttgctgggaagagcagcccctgtacttccatcctggcaggtttttattacaaactgcatttgcatggaaacaggatttgttcttggttccaaagcaggtcaggtttattatccccaaatacatccattactctccctagtcattacaggtgacattggcaacatggggaaggcgaaggggggcagtgccagcttctgagggtttaaggagagattggatacagattgcctgtggacttcaggacatctctacgaggggaggagggggagaaaggggaataatccccatagggctgtttcattttcttttttcttttttttgagacaaagtcttgctctgtcacccaggctggagtgcagtggtgcgatctcagttcgctgctagctccgcctcctgggttcacgccattctcctgcctcagcctctcgagtagctgggactacgggcgcccgccaccacgcccggctaattttttttgtattttttagtagagacggggtctcaccgtgttagccaggatggtatcgatctcctggcctcgtgatctgcccgcctctgcctcccaaagtgctgggattacaggcgtgagccaccgcgcccagccagggctgtttcattttcaatttgcagtgggatcccaagtctttgaatgtttttctgtgccaaaattttaaaatattaatacagaagatgccacttcctagtcctaggtagggagaaggaacacaggaaagaggaagatggagtagtaactgatgtcagcaaagcatgtggcattatatgctgcaatgtgtgccccaaagacagcgattcctgtaaaaggaatgagagagggagggagcaggcctgctggaagatcacacagatgagtccataatctcaaagcaagtggggcactagggggcggggtggggggtgtaggggtatggggaaggctcgggaaatcaagccactgggtgcacttggaggaaagaggggtgcttctaggaagctacgaccacacattagaaagactggagggccagacaccacattcgtatagaggctgcatctgtctgagaggatcacccagtgcttgactggtgtgtgttttgtactctgtgcttttctgtgtttttctttctctctctctctctttttttttttttttttttttgagacagtctcactctgtcacccaggctagagtgcagtggcgcaatcttggctcactgcaacctccacctccccacttcaagtaattctcgtgtctcagcctcctgagtagctgggattataggcgtatgccatcatgcctggctaattttgtgtttttagtagagatggggtttcaccatgttggacaggctggcctcaaactcctgacctcaagtgatccacccgccttggcctcccaaagtgctgggattacaggtgtgagccaccacagcctgccttttctgtgtttttcaagtgatctttgttgagcacgcaattatttttgtaatgaaaaaaaaattttttttgttttatttttaaaagaagacatgtattcctaagagcatggtcaccaaggaagtgggttcaggttgggagtgggcgctgggaagacggcagacaagcaagacttcttttgaaatgtatgagtggcggccaggcacagtgtctcacgcctgtaatcccagcactttgggaggccaaggcaggcagatcacgaggtcaggagattgagaccatcctggctaacacggtgaaaccctgtttctactaaaaatacaaaaaattagctgggcatagtggcgggcacctgtagtcccagctacttgggaggctgaggcaggagaatggcgagaacccaagaggcggagcttgcagtgagccgagatcgcgccaccacactccagcctgggcgacagagcaagactccgtctaaaaaaaaaaaagtatgagtggcaagacccaggactagctcttcccaccacccccagaaaaaataaatggccaaaagcctcaggctcctcctgagggggatgctatggactgaatgcatccccccaagttcatatgttgaagccctaattctcaacgtgacggtattaggacatggggatttggggaagtgatgagatcatgggcatgaaaccctcatgaatgggattagtgcccatagaagagatgcaagagagaacttgtgatatcctcacatggaaaacagatcatctctcgaccatgtgaggatacagcaagaaggcgtctatctgcaaaccaggaagtgggccctttccagacattaggttttgggcttcccagactccagaactgtgagaaataaatgtttgttgtttaagctgtccagtctgtgatatgctgttacagcagcctgagctgactcagacaggaaggaagaaaatggaaaaaaaggaacagggcaggatgaggactgggtcctacccaccaacaggaaatggtacgattgtggctcatctattccagctcttgttgcctgctgcataccaaaaacgaaactgatcttggagaaaatgcctgggcatcctgtttaaatgcagattcctaggccctcgtgattcacttagttacaaagtatgtggtttggatcaatttttcaggccatccttgcaagggtaatgtttgaggaccagcggagaggtaacaaaagacagagaaacaaccaatgatgagggatctgtgagcaaactgagctgattatataaaagagaggggccgtttctgtcttggtgattacaggaagactttgctgagaactggagtgggtgtggagcttgtatgctttggggacagacagacctggctctgccacttactaacagataattttgagcagaacaatagcctatctgagccttagttccttaactgtaagctggagattctaaaactcaccttgcagaatgcttctgaagaatatatgaatacaactctgtggcatttatactcataacccagttatcaatgttctgagcccttggcagtgcattattgagtcttttcctaggatttatcttccccagaatcttctgggaatgggggtagaatctgagtaaggtcactttacctcctgggatcctcacaggttgaggggttgccatacatttggtcagagctgtcccctgtagcatccctcttctcctgcagtatcttttcctccaatgacccctgtcattcaacttcccacagttcactgccacctgctgctgaccgtctctggaccctagacttctggcctagctcctgcaggccacctggttctattgtgattccccatccctggtcagcagttttgcttgacctgctgttctgtggtgaggaccacagaagggatgttgtaagctaggaatgtgattctccccctcatactgtaaccctctttttcccagagcacacaggtaccttgaggaagatggattagtctgtcctcatgctattaataaagacatacccaagactgagtaatttataaaggaaaagaggtttaatggactcacagttccacatggctggggaggcttcacaattatggtggaaggcaaaggaggagcaaaggcatgtcttacatggcagcaggcaagagagcacatgcaggggaactgccctttataaaaccgttagatctcatgagacttgttcactatcgtgggaacagcatgggaaaatcctgcccccttgattcaattacctcccactgggtccctcccacaacacatggggattgtaggagctacaattcaagatgagatttgggtggggacacagccaaaccgtatcagaaggcaagagtggagagtgtcacatgaattagacatggcgaggtatgctgaactcttattgtccctgggacctagcacccattgaccttcatggcccctactcaggttttgtgagccatattttctctccccgttttccagccttttcttggacccgaggccgtctgtgcaatctgagtagatgggcttgctaactctcatagaatgctctgggatgtgggcatgaataccctaccatgttctttggtttgcatgaagctcaggagctctataggtaagaatgcaaaccctgtctacaactaaagttcagaagtgtttgggcctgtctgttgaaagggtggagaagtgggacaggaacagactgtgacagaccttacctatcatataaagatgtttgtcctctcttctgtgtgtaactgaattgggcaagacctttgggaggaccatgttttgctggtaatataaccagccaacatctccattcccaacccaagccccatgctgttcagtattgctagagaaaatcttataaccttgtacataggtgatggcccccaagttcacactctccaaccgcttctgggctccagatattaggcagtaatctcacgtgttcactgcttcctcatttccctcaagtttgggggaactctcctaactctccaagcccttagctcctattccctcttctactgctccccagagaagatagaagaaattagtaagttaataagctgattctcaagatgcatatggaaaggcaatggatgcatatggaaagtctcaaaaaaaaaaaggaacagaaatttatgctcccatagttctggaggccagaaatccgaaattaaggtgtcagcaggtctcgctccctctaaaggctctcggcaagaatcatccctgattcttcttgcctccagtgttgccagcaatccttggcattcctcagcttgtagcagcatcactcaaatctctgcctccgtcggcccatggctgtctccctgtgtgtctgttcctgtgtctctgttttcttttcttataaagataccataccagttatactggattaggatccaccctaataacctcatttaactcatgagagactgtatatgcagagacaatggccagatcatacataaaaatcaaactctgacccataatcttcagccagtccaagaagccaacccattatccgcagtaaccagtccaggaagtaaaactacttcctgtagcaaccagtccaggaagctaaacaataacccttgttttgttttgatctgatttgtaactgacagcttccttaattattgctcccacttccaacttaggacctatcagagaaagccagatatactcccctaaccaaccatatagaacgcagtcagcctgctcctggttggcctgcctccagcttccccactacaaccgtctccattcagggcaaaatgagggccttccccatgttccattatgaagtcttcccactccactgcctgcttttgagtctctgcccaacgcaaatgatggtggctgactcccttgctatagcaagctctgaacaaatagcctttgcttgttctcatttaggcggttctggatttatttatttccacacttgattacatctgcaaaatcccaattttctttcttcttgttttttgtttttgtttttgtttttgtttttgagactgtcttgttctgtcacccaggctggagtgcagtggtgtgatctcggctcactgcaacctctgcctcccaggttcaaacaattcttctgcctcagcctcccaagtagctgggattacagtcatccgccaccatgcctggctaattttttaaaaattttttagtagagatggggttttaccatgttaggtgggtcttgaactcctgacctcaagcagtccacccgcctcggcctcccaaagtgctgggattataggcatgagccaccatgcccagcttaaacccctattttcagataagatcacattcacagaaactaggggttagaacttcaaaatatctttttgtgggatgcaatgcaacccacaacatcacctaaggcccttgccctgcctttccctctcccatattctgtttccttccacaagaagctaccttctatgtccccagatttagcatatgacatcaaacccatttgcttgtctcctccactggatattgtatattgctccgtgggagcggcaccttattggccttgaatccagtgtgggattctaggttggcctgcctccagcttccccattacaaccgtctccattcagggcaaaacgagggccttccccacgttccattatgaagcgttcccactcctctgcctgcttttgagtctctgcccaatgcaaatgatggtggctgactcccttgccaccatccttgcatgcccaatatgcccaacaggcatgcaaaggtgcctcatagagattcgtggttaaactgcacagccgagtgcaccttctcgctttgtccacctgaaaaattatttctcatcctttcagatctggctccagggtgagccctagagtcatctcctgacccccactcccaggctggagcaggaggcccccagcattttttggtatacctatgtctaacatcctgagaagcctgctttcccaaggttggggttgcgtttttcattccctattcccagcaagaaatacagggtctcgaactgagtaaatgcccagaaagaatttgttgtatggatggtcctgagacaaaaagagctctcagatccttcctgctccttccatatgcaccctgtacacacccacatccaccgccatacccacctactgccaatgcctgcagtcactccctgttgtatgagtgtctccaaacacaatgcaagggaagccccacttgctgtctttctgtcacagtgtgtgtgtgtgtgtgtgtgcgcgcgcgcgcgcgtgcatgcgcgtgtgtttttatatatatatataacatttaccaccttttaaaaactgctttcagccgtatgctttcctctaactaaccattgctgtttccctccttttctcagctaagctcctggaaagaactgactccacttgccatctctaccacctctcatccaagccgccttcctcctcaacatgctgccatccgccttctacccacgccactttgccaggccccagtgacttcctggatgttcaatctaacattcacttttcagttctcctcttccataaccttactttcttcatgcccctacctatgagaccctctctcctcttgccaagcaggctttcctccctgctactttctttctctctctctctctctccccccccatctctctctctccccccgtctctctctctctctccccgtctctctctctctccccgtctctctctctctccccgtctctctctctctccccgtctctctctctctccccgtctctctctctctccccgtctctctctctcccccccatctctctctccccccgtctctctctctctccccgtctctctctctccccgtctctctctctctccccgtctctctctctccccccatctctctctctccccccgtctctctctctctccccgtctctctctctccccgtctctctctctctccccgtctctctctctcccccccatctctctctctctccccgtctctctctctccccgtctctctctctctccccgtctctctctctccccgtctctctctctctctcccccgtctctctctccatctctctctctccgtctctgtgtgtgtgtgtgtgtgtgtgtgggtgtgtgtgtgtgactttttttttttttttttctgagacagattcttgctctgttgaccaggttggagtgcaatggcgctatctcggctcaccgcaacttctgcctcctgggttcaagcgattctcctgccttagcctcccgagtagttgggattacaggcacccccccacccaacatgccagactaatttttgtatttttcgtagagacggggtttcgccatgttagcctcgaactcctgacctcatcatccaccagccttggcatcctggcatcttttaaaagtcagcattccccatcctctcttcttctcccccttacattccttctgggtgatctcatttactctctcacttccacctatcacccatagataataactcccagatttggccaggtgcagtggctcatgcttgtaatcccaatattttgggaggctgaggaggaaggattgctcaagcccaggagtttgagaccagcctgggcaacagagcaaaaccctagctctgcaaaaaatacaaaaactagccaggggtggtggtgcgtacctgtagtccagctgctcaggaggctgaagtgggaggatcacctgagcctgggaaggttgaggcttgagtgagctgtgatcacaccactacactccagcctggggaaaatcctgtttcaaaacaacaacaacaacaaacttaatgtcccaaacctaaacatctattaaatgtctagctcagcttttttctcccaagtgtctcaactcatagatcaaactattttctagccatcctatgggcatcctaacctcagcagaacccaaacagaactcaccctctcttcccatggggtgtgtgctcctcctctttattcctcttggtgaatagtaccactcccatccagtcaccaaagccagaaatccaggaatccccatctccctactgtaccccaatcctcttgttccctaaatctaataagccactaggtttccagattcttccctctcaaacccttcagaatcacttaagatcaggaattcaagaccagcctggccaacatggtgaaaccccgtctctactaaacatacaaaaattagccaggcgtggtggcgcatgcctataatcccagctacttgggaggctgaggcacgagaatcagttgaacctgggaggcagaggttgcagcgagccaagatcatgccactgcactccagcttgagtgacagagcgagactccgtctcgaaaaaagaaaaaaaaaatacaattgttgaaataaaaaattcaatagaatggttagaaatgaaatatcacccagaaagtcagacaatgacaaatatatggaaaataaaagagaaaagccaagggaatcagggaactggtctgagtaatagaggtgttaggaagagggaccaacgacaacagaagaggagtaatttaaaaaattaatgtaatgacatcttttaaaaataagagacatacatttccagattaaaggggctcactgaatgcaaaccacacaaatgataaaagaaaaaagtgattcacaccaaagcatagcctgatgaaatttcataataccagcaatgaagagaagattttaaaagtttttgggggccgggcgcggtggctcacgcctgtaatcccagcactttgggaggccgaggcgggtggatcacgagttcaggagatcgagaccatcctggctaacacagtgaaacgccgtctctactaaaaatacaaaaaattagctgggtgtgggggcgggcgcctgtagtcccagctactcggaaggccgaggcaggagaatggcatgaacccgggaagcggagcttgcagtgagccgagattgcgccactgcactccagcctcggcgacaaagcaagactccgtctcaaaaaaaaaagttttggggaaaagacattggacacacccacatcaacgctgtaaaccaggatctaatggataaatatctttaaaattctgagggaagaggatttccaatggttgaatagaattctatatacggttaaaccatcagtcagaagtgtgggtatataaagacatctttacataagcatagtgtcaaaaaatttacctttgtcatatctatttctgtataacaagtcacatcaaattttggttgtttaaaaagtggacatctattatctcctattttctatgagagggaaatttgagagtggcttagctggcaggggcttcgctgggtggtttgggctaaggatttgtcatgacggagtgtattagtctgttttcacactgctgataaagacatacccgagactgggtgatttataaagaaaaagaggtttaatggacttacagttccatgtggctggggaagcctcacaatcacggccgaaggtgaaaggcacgtcttacgtgacagcaggcaagagagaataaaagccaagtgaaaggggaaaccccttataaaaccatcagatctcgtgagacttattcactaccatgagaacagtatggggaaaacctcccccatgattcaattatctcccaccgggtccctcccacaacacgtggaaattacgggagctacaattcaagatgagatttggatggggacacagccaaaccatatcagggagtaattaaggaatcggccaaagctgcagtcatctgaggcttgactgaggctgaagaatccacctctaagctcattcctgtggttgttggctggaggttccaccttcccatcctataggactgctcaagacagggctcacgacctttcctcaaaaggagacgggggaagagaggagaggggaggtgagaggaagggaagagaggggagggaggagagaggaggagaggtggagacgggtgagagcctccaagataaaaggcacaatgctttccatatcctaatctctgaagtgacataccatcatccatcatatgtattagtcatacagatcaatcctggtacaatgtgagaggggccgtgcagggtgtaaataccaggagatggggtttattagggctcatcttggaggctggctaccacataccctttctcaagaaactcctggaggtgatgctccaccaaaacgaagaagtaagccagacagagcaagagagagcaaacagaagacgaacattgggaagcaagaaagaaatcctcagggtaatggtaaagagaagtcctgagatgagagctgcgcagcagacttcaagaacaactggtctagattgagcagaaggataatgatctccaggaagaatgcctctaagccataaatgaaatcaatatgttgaataaagttagagaagatttttgactgcagaatttaggaatgaatcattaataggtacacaaaaaaggaagtaaaaaaaatctggggggctggccatggtggctcacgcctgtagtcacagtattttgggaggccaaggggggcagatcatttgaggtcaagagttacagaccagcctggccaacatggtgaaaccccgtctctactgaaattacaaaaattagctgggcgtggtggtgcacgcctgtaatcccagctactcgggaggctaaggcaggagaatcacttgaacccaggaatcagaggttgcagtgaaccgacatcatgccactgcactccagcctgggtgatggagtgagactctgtttcaaaaaaaaaaatttttttttttttttaacaaagaggtaatcattaacttcagggaaaacaaaagactctacaagaaaaaaagaggccagcaaagcatagtgcttggctcagctgtaaataatatttacattgttatagtaatgcaaacattgactactgacttgataaaaatgatggcaaatgatgtggtttggctgtgcccccacccaaaatgtcatcttgaattataacccccataattgaaccatgggggcaatttcccctatgctattctcgtgagagtgacttctcatgaaatcttatcttgtggttttatacgtgtctggcatttcccctgctgaacctcattctctctcctgccaccctgtaaagaggtgccttccgccatgattgtaagtttcatgaggcctccccagccatgcggaactgagtcaatcaaacctattttctttataaattacccagtctcgggtatttcttcatagcagtgtgagaatgaactaacacagtaactatattgggaggaaaggaaatagggaagttcatcacataggtggtgagttggggctctttcataggaagccaatagagtccaaaacagaaaaatcaagaaatagaagtataagtatgccatttagaaaacatagaggttaaattcagtaacagaagaaacaaaaaaaagaattgaaagtttttgtacttagggaaagtgtcagaagtggagaaggatagagcaggagtctgctgggtgtttgtttgtttgtttgagacagagtctcactctgtcaccaggctggagtgcagtggcgcgatctcggctcactgcaacctctgcctcccggttgaagcgattctcctgcctcagcctcccaaatggctgggactacaggcgtgcaccaccacccccggctaaatttttgtatttttagtagagttggggtttcaccatgttggccaggatagtctccatctcctgaccttgtgatctgcctgccttggcctcccaaagtgctgggattacaggtgtgagccaccgtgcccagccatagtctgctgtttttctttagaagtctaatcctaccgtttggtttgataaaaaataaaataaaatttaaaataaaaagattttactggtcaaacaaatccttctactggtttgcactgaagatcagcatatattatcagcatatattttactatctggacctcaaattatagagaattatataattttagaagaaattaaccaggatgagttatttcagcccactaggcagcgtctatctactcagggctacagagctactctgcctcccacccaactaaataaacgcatcaggctgggtgcggtggctcacgcctaaattccagcactttgggaggctgaggcaggaggatcacctgaggtcaggagtttgagaccagcctgaccaatatggtgaaaccctgactcttctaaaaatacaaaaattagccaggcatggtgtcacatgcctgtaatcccagctactcaggaggctgaggcaggagaatcacttgaacccaggaggcagaggttgcagtgagccaagattgcaccactgcactccagcccgggtgacagagcgagactccgtctcaaaaaaaaaaaaaaaaaaatgcatcaaatgttcattaagtcatgcagcattaattgctttgtgatgaactgccagttttgtgacaagatactgaaaacaggaacaaaaccagtttcagaaatgacaaccctttatagcatctctcctaaatagaatatatgaggccatgaaaaaaacactggatttctgaaaggcctgtgaagggcaggaggacatcaaaagcaactaccgtcctgcatgatttctgaacacttgcaaaggatttcaggcctgggataggcttctgagttcccttatcctgagaggacacagtcaaaagttggactgcataggccaggcgcagtggctcacacctgtaatcccagcactttgggaggccaaggtgggcagactgcttgaggtcaggagttcgagaccaacctggccaatatggtgaaatcctcgtctctactaaaaatacaaaaaaattagccggggtggtggcgcatgcctgtagtcctagctactgaggaggctgaggcaggagaatcccttgaaccccaggaggtggaggttgcagtgaggtaagatcgtgcaattgcactccagcctgggtgacagagtgagactctatctcaggaaaaagaaaaaaaaaaaaaagagttggactgcagggcttagaaaccaattttctccccatttctcttatacattcttcgtgtttagaatagatggatgaaggtgtgtatacctgtgtaggaggattatatacagacatgctcttcagagacatgacattgtcagttgcctgttttgtgcttttgacttgtttatttttgccaataacatcagaactatacatcaaagtgagtactggctattcctaaatagtccaacagcactaaaaagtgcacatcttggaaaactaaatatgcatttaatatcaccactgccaattcatttctggaacttgtccttaaaaattcactttggagctgaaatcagaatgtttagaatagactcactggtgtcaagtcttcattttggggggatgggagataggatttttagaaccagtcatattctggtaagttgtttaaaatttttatatgctatgtatacatgcaaaagttgtgttaaaaattgtttaagttctggctgggcgcggtggctcatgcctgtaatcccagcactttgggaggccgaggtgggcagatcacttgaggttggaagttcaagaccagtctggccagcatggtgaaaccccatctctactctaaaaatacaaaaattagccaggcatggtggtgggcacctgtaattccagctactcgggaggctgaggcaggagaattgcttgaacctgggaggcagaggttgcagtgaggccagatggtgccattgcactccagcctgggcaacaagagcgagactccatctcaaaaaaaaatttgtttaagttctatttaaatgggctcattattgaaggagcactaaagtgagcgcttctgcagggtcacactgtgaggccaagcctcatctccccagacacctgctctggcaggtcatgttaggatcctacaacgtccttacccatctctactgggagtgaagacacctcctaagtcttgaatccaattattcaaaagagtccagtgttccaacaggctagaaacaaagcctagaactgtcatgctttgcaaccccaagtaaaagggtcttgccagggagaaagattgagtgtctgaagtggtatggagaaattaggtttcagtggcaggcacagggacaatctgtcagatctggctgctggagagtgaggtgggagagagccagggagggggaggaggagcagccgtttgtaggctgtgagggcgagaggagacacatgaatgactcgggggcgggggcgggggcagggctcccattccccctcaccaggccggccatctgctctggggcctcaggcaggcgggtaccatgaagcttggggactggcagcccaaccagcaaacaaagccaacaagctggctccgctacaagggagcaagaagaagccagcagggaagtcttacttttggaaagtggccaggtcccatcacgagggcctcacctggctgaacaaagtccctcctggtcccacgactggaacccattccgatgcccatgggctctgtggagtcacctcctgtgtcaaagaaggaaaacccaccctttcagccttacagaaacgtttgtagccctcagcaaaagcatcctttgcggctttagcattcagcctccaaacaggcactaagtgctaccccgccacccccagatagcttttcaagacccttttccaaatccatttgtctttgcagaatccactccctttgcagaattgacatctgccctcaatgacttctcacctgggcctctagcaatctcatgcctgcctcttcccaagaagggcaccctgatctcggatagaggagattctctttgtcagtgaggccagagagaggaaagccaccatgagaaggggagacagaaaacgccaggatctggattccaaggcactgccatcatcctgattctaacagggcagcatcgcatccccagatgggcaggaggatggggaggggagtgagaaaagagaaaagaaaggccttgggatggacgtttgggccccatcctgcaaggccgggtgccgagctcgcagaggccgccccggaggtgagttctgtgcgctcaccccaccccggggccggctaaggaactgcagcctctttggaaacgtaattgaactatatcagctgcagtggctggattcactcctggtgtttgcttcttccggggagcagaggcccttcagcagcagaaattcctgactcagaaagtgagagagagaaagaaacaggctctgtgataagagatgggacgccgctcagcatgaagacccacccacccccaactcctgccaacgctgggccaacatctccacttggaaatcctctcttctgggtctgcaccttcccaaagccctgttaaattttaaatattctgtgtcccgttagggaggaactaccgtttcggccactagcacaaggagactaggacgaggagaatttccagagcaaggaggagctatccgtggagacgggacagggtgggagcctcacccaggtacccagctgctggcaacacacaggaacacagaccccaggagggaaaaggccagtgtggtcaactctggccatgattaaattagatcctgaccttcgtcgctctaattacaacgaggacccgaattactggttctggcccatttgtgaagttgctgccctttcacaagctgtgaaacacccattctacaggaaccagtgcatcttgccaaagggaagtgaggtgaggtgtctaccctgctatctcactaggagaggagaggtagttgaaggggattttccttatgagagagaaaactctggttccatctgctcatggaacagagacttccaggccccacggctgcacaaaccctgctcagaatgccctctgcccagataacagggttcccagggtgatggagtgcagtgtgagtccacagtctcctccctgggggaggagagctcctgagttgcttgtggcttcacccaggacagtctttctcccttcctgatctaaagtttctccacatcagaatcgagacagtttaactctcagaggttctcggctctagctcacatgaaaatcaactggggagcttgaaaaaattacctgggccccatgccaaaaattaaatgagaatagctaaggacggagccagggcacccttagttttagaattccccaggtgattttcccatgtagcagccttgtctcaaagccctgacaggtgctctcagaggggcgttctgccgctgtgagtctataaatccctcccaccccccagcagcagctcctcttttggggaagaggctgctcttctgattaggctaatcaggcaattcagcatttggtggagggtgggggtggagggagtcacacagcaggaaagcaccaggcacttctgtcacttgggtcattctggaagggagaggaaaaaattcttctaggaggcctggatgattgtcagagcctcagagaacttggaaacaatccagaactcatccacaaagacgttcttaggatgggaaagtaactgcctggagaagggcttaaaacaattgtgggcccggcgtggtggctcatacctgtcatcccagcactttggaggttcgaggtgggaatgggggggatcacgtgagcccatgagttcaagaccatcctgggcaacatagcgagaccctgtctctacaaaaaataataataataataattcaaaaattcaccaggcctgctggtgcatgcctgtagtcccagctcctcggcaggctgaggtgagaggattgcttgagcacaggaggtcaaggctgcagtgagcagtgatcaagccactgaacttcagcctaggcaacagaatgagactgtctcaaacaacaacacaacaaacaattgtggctatcgatcaggggaagggattgtctctagtattgtaatcagcctctaagaacgattaaggaaggtgggagtcccatttgccaatggattcttgctctgcataattatgttcaggatttggtagttaaactgtcactgctagctgtgtgaccttgggcagggtacttaacctctctgtgccttgcttcattcacaaaaaggaggattaataatgctgatggtatttcataggattacagtgaggattaaatgagttaacagaaagcatctagcacagtgcttggcacacagtaagcacagaataggtgttgaaaattactcagggaaatacagggaaaattactcatagggaatccatggctaaataagttgggaaacactgggttaaagatcaacagctgtctttcctgcaagatttctcaaaataccaatgttactactgataaaggcatgtgccacaaaggttgagagaattaaatgagataaaaggtgtgtgaaacactcagtgcaccctgcacgtaatggacattataataagtatgtgaggccgggcgcagtggctctcacctgtaatcccagcactttgggaggctgaggccagcggatcacttgagctcaggaattcgagaccagcctgggcaacatggcaaaaccctatctctattaaaaatacaaaaattagccaggcgtagtcccagtgacttgggaggctgagatggaagaatggcttgagcccaggaggtcgaggctgcagtgagccaagataacgtcactgcactccagcctgggagacacagtgagaccctatctctctcttctctctcttctctctctctctctctctctctctctctctatatatatatatatatgaatgtgagagagagagacatatatatatatgaatgagagagagagacatatgatatatatatgaatgtgaatctgcaggacatggggtgaatggtgaatgtgcagctgtgcaccatttcccagagttgcctgtgctctttttctttttttttttttctcgagagacagagtctcactctgttgcccaggctggagtgcagtggtgtgatatcagcacactgcaacctccgcctcccaggttcaagtgattctcgtgcctcagccacccaagtagctggaattacaggtgcacaccaccatgcccggctattttttgtatttttggtagagacaggggtctcaccatgttggtcaagctggtctcaaattcctgggctcaagggatccacctgccttggcctcccaaagtagtgggattacaggcgttagtcaccatgcccagccgatttttctacgtagcatcttgctctgagaattagtggtccaggaagcacactctggaaaaagtcacagcaggagacagcctcaaattttccaactctgtcaccatggcactgaaaaagaggagccggaccaggcaagagcagcagagatgtggttatcaggaagaatgtactggtgccagagaagtgctgggacagacggtgggggagctggggactcctctctcctccagctttcataccccgtgcgagtggggtccctgtggaaggggcatgagtccgcgattcagaagagctgatttgactcttgactttgccactcccttgctgggtggccttggtcaagtcacctgtcctctctgagcctggtatctttacttggataatgatgggatgtaggctataaacctgagaatgtctaaggacccttctggctccaggattttatgtctatatgcatttcggccaaaatggggatgagaagaaaaaaagggaatcctatctagagcacagtgtcttctaaccacgattcctgattctagacttgtttgggggtggtttccaaagagcttctaatgcctactcactcacttggccaatgtattccctgagggtcgaggttgctaatagagaaaaatggtgacacgccatgccagactcatagctgttgagggctaggggacagagagaggaagaaaggtcctcatttgaattctttgtgtatttgaagagactattaaatcgactatgccaaatgcccccccaacctccttttttttttttttttttgaaacagggtcttgctctatcacccaggcgggagtgtagtggcatgatcttggctcactacaacctccacctctcgagctcacgagatcctcccatctcagcccctcaagtagctggaactacaggtgtgcaccaccatgcttggctaattttttttttttttttttttttgtagagatgaggtctcactatattgcccaggatggtctcaaactcctgggctcaagtgatcctccttcctcagccttccaaaatgctgggattacaggcatgagccactgtgcccagccctcaagtttttaaacagtgatatggtgactgtactctatattttccaaactaaacatcaggacccatggtatcagaaaggcttttacatgctgacatttccattttcgtaaaatgcggatggtttgtgggggacaagggaaataacagctaaaaacaggagtgtcccaggaagccaaggtactacgatcaccatgccgagtatcttctcccccgccccctcaaaccaccggatatctgatgttctccacggcagaagcattgctcttttctcatcaatagaaatggcagacctcaccctggcattcccgtaaagatgataaaaaccacattggatgctcagactggtatctaacactctcaaacacatccaatcctcccctcagggctctcttgctttcctccaggcttaattgcaatacttactttcaccaaattgattgcagactaacaatttcccccatttaatttattaagccactcagagacataatgacctatttgggagttgtgtcttccctgtggagctcctagacgatgaactcctcttggcaagagtgaaccgagcagcccctccccatggaaggggctggacactggcctggccctttgtcctcctccttttcttaatttcctgccacctattgtctctctgataactgctgacagagggaagggtgctatttaattgctttaaagatatcaaacaagccagttagaaggttatctcctccccaacccctctatttttctggctcaaggttttgttacttagttactagccaagctgcagaggaagaagaggtagccccatgtggattacagctcagacttcattcagcagatggagggcagagtcaaaatagcctgggggagccaaaggtggaataggaactcgaggttggcccctgagtgctgctggcagcccaaactgctctttggaggccttcaaaggtggggaggggagaagagaggaggcattcattttctggacaaaatcaacaatcatcctagatgacacatttctgctgtcaaggtccatgttgttcagagcccactcagccagctgcagtaagacaggtgtgcctaacgtgggtgcatcagtactttttccaggctgggtctgccctatgtgataaggaggggaaggctcgacaaggaaagtgcatgaaggggaatgttgctttatttggtcatccacattaaagagcatacagggctacatgtggtggctcacacctgtaatcccagcattttgggattattcagcctattcaggaggctgaggtgggcgattacctgaagtcagtagttcaagaccggcctggccaacatggtgaaaccctgtctctactaaaattacaaaaattagccaggcatggtggcaaccgcccggagtcccagctacgcaggaggctgaggcagcagaatcacttgagcctgggaggcagaggttgctgtgagctgacatcacgccactgcactccaccttggacaacagagtgagactccgtctcaaaaaaaataaaaattaggccaggcgtggtggctcatgcctgtaatcccagcactttgggagcccgaggcgggtggatcacttgaggtcaggagtttgagactagcctgggcaacatagtgaaaccccgtctctactaaaaatacaaaacttagcagggcatggtggcgcacacctgtaatcccagctcctcgggacgctgaggtacaagaatcgcttgaacctgggaggtggaggttgcagtgggccaagatcgcaccactgcactccagcctgggcaacaagagcgaaactccatctcaaaaaaaaaaaaaaaaaaaaaaaaaagaggtcaggcacggtggctcacacctgtaatcccagcactttgggaggccgaggtgggtgaatcacgaggtcaggagatcaagatcatactgggtaacacagtgaaaccgcatctctactaaaactacaaaaaattagccaggcacggtggcacgtgcctgtagccccagctactcgggaggctgaggcaggagaacggtgtgaacccgggaggtggggcttgcagtgagccaagatcgtgccactgcactccagcctgggcgacagagcgagactccgtctcaaaaaagaaagaaagaaagaaggaaagaaagaaagaaagaaagaaaggaaggaaggaaggaagaaagaacaggacttcaaacagagcatacttagttatgggtcccctccccacacagaaaaactccctggacatcaatgacttcatccattcggactggcagataggccacatttcctgacaccctgtctcttcaccttaaaagggttagctttccaccacaccagcaaagaccctcaggacacacgattcatattcccagctgagcatctacccggaggtaagcagacgctcaggcacctgggccgtccttgccctaatccctccagtggtgtccacactgagtcctgcagcactggtagaaggtggtcttcggctcatctgcagagtgggtctgaagctacatgtagtaagcacaaggaggttctcattgaggacatggctctgcagtagagtcaacatcctcccaggcagctgctcccccaagcccatcatccacttctttcagctttgagtacttccaatttgttaccttgtgggtgaagtgcacacagaggcacgtgttgcaggcgagggagtggcagcggcagcgctgtccctcctccacgatcagcccatccctgcagccagggtagaacagcagcatcatctcggactctgctggctccagttattattttttttaatgaaacgtaaatctggtattaacagtttgagaacttttaggaaaggaatttgagggcagagtgggcacttcctggctcttccttcttttcctggaaaccagtcagattactggttttaaactggaggtggcaacaggcattgtagcaactgtgtggccagaggatgccgagttcccctgagcacaattccacgatgccctcctgatattactattacctctctgcctctccctcttcccactgacggtgagcagacacagccctcttccagtgagctagccaccccagcccttccacttgcatacacatgtctaaaagagatgctggctcccagattgactcctggaacttaaggcaattgcagctcaatttccatctcaccctgagctccaggatgccaagatttaagccctatcatgaccaacgtctcagagagagatggaaactcctgatccccatctcacagtgggtaccccaagatacagcttggcccagatagaagagagagctggctgctgctgtacctggtggttgcttttccatgtcactcatctatctctaaggctcaccccacctgccacacagcttctggacttttacttttccctggtgaattggaaatcagataataggatggacaaatcaaggcagctcagctcacagagaaagctagttggggtttgctttctgttttcacatcctctaaaactgtactgaggatggtgtgtgtgtgtgtgtgtgtgtgtgtgtgtgtgtatacctatgtacttggaggagggtgaggaaggggaggctgcaggattgattatgacttattaaactattggaaaagaggctgaatcatcacagtcaaaaataaacagctgcaactccatgcgactcccacttcttgcctgctcccctttgctccctcacagcatgtaggagagactgtgctgggtcagaccagcaggtgctgactgacgtggctacagcaaggggaccacctgtatggccgctgcacctccaagctgtgggacgcagggacagctgggaccagtcgacgtccactggccctctgatggctcctaggactgaatcttggactccaggtgcgggtttacactccctgcgctcattgggaactgcatggagaagcgctatcccctgagccctttttctccctactcttagcctggccctgcgccctgcgcccggggctggcccacggtaaacacagctttgctaacttgtttggctaaggaaatcacagaggtcccggtataagtctgggtcaccccggccgccactccagctgcctagaatatatgggtggaagggaatcgactctgtgaaatcagagggaaaatagcgcttgtccttgccatgagtcttgaggagaccgaaaacgcttaaccttttacgcccccgcaggcgggtcccctctctccccgctccccggctgtctgtaagctctgcctgcggccacccgcaggcgtttcagccggtctcacccctgtccttctgcaggacccgggaggaggggttgggggggcggagcgaagccgctgtgacgtagcgggaggggggcgtggggaaatgtgccgaggggcccgggctggctgggccagtcccagcggcgcagccacccatgcgcgcgcgctcgcaagaccaccagcgcccagagccccagtctgaggcttggcgccgggggtctgcgggcgaggggagctctctacgtgcgaggggctagcgggagccggcacaagagggtcgaggagccaggaaccccaaacgtccggcgccaggcgctagccaagctgctgcgcgccccggcgcccagctggctcggggacagccgctgggtgtcggagaccggagctagcggattgcagcggaaaagcaaaggtgaggggtgtgtgtgtgtgtgtgtgtgtgtgtgtgtgtgtgtgtgtgataagagagatggagggagcgagaagcgcacttgggcacctgtgtgcatctgcgctgatggtggtgtgcccatccgagtgcctgagcttaggtcccggtgcgtgattctccgctcttgtgccttttggggtgattgtagtaggaatgaacgacaacgggtacccttgcctgagtaagggggctgtgggtagagtgtgctggaacggacgtgtcctcgcagcctcatgcccgtgtgcgtggcgtgtgccctttagcccgagatttcaggtagctgcgacgggtgacaacttctctcccagccccctacaaaagagacctggcgcgaggggagcgaggccgtgagatgccagctggggctcctgcgggagcgcacccggagatccgagcctgccagaggcaggcggcgggcgcagagcggagaaagaggggcttctctccctagacgctgaacgatctaggatccgtccccgtcccccacctcgggacagaaaggacagtttgtctaggtttggagagaaaaaaccactgcataggccgtgcccaaaagccgctggccaagtcccccaagcgactgtcttctgcgccccgatgtctctgtcctcagcgccccccccccacacccggcacccctgctgtgcgtttcgatactgggcgtgctggcgccacaatctccgctcttgcctcgtcttcctggaaatggcacagagttctttgggaaacccttgctctgaggatcagcgagttggatggccaggaggaggactttctgtgccagccgggagcaaccggctccgcggtcctgacactcgcccctccatttctcaaccccgtaggccagcaccgccccggcttttcccaggcgctcacgcgccgcggtggccctcaggggcttttgtcaccctgccagtgggggctctcgctctagccgcacagagaccaagccgggttctgcaggccctgagggaggcggggggtgggaagtgaatgcgggaaacatgatggggagaggagaaactgaagctgagtaggatttaggacctcccctgatgtcgggtcgccatcccaacactcatttcttgggctggtaatcacagcccctatgtaaaaggggggcggggggggcaggtgcgtgagaccattctcaccctcctctctacagagcctggacatggttcagaggaaaccaaccactagccatttccagcatctaacaattcttgggctggaaaaacaaagaatgcagaaaacgaaacttccttgtacatttaatttaaccacaattcatctagaattgtctgcctggcattggaatattctttctctgaaacaaaaatgaaacagaagtctctggaagaccttaagcggctgacttctttgttaaataagactccccatgatttaagctcatttcttgcttagaggagccttcccactctcagccggctccccagcctcccacctccaccaccttcaccaagactctgaaccctgtctgttgctaccattaagcaattctgtcctgttgactcaaactccagttaaaatgaccgagttagggctggaaagcaacactcaaccctctctcatactccctgcaccatcatcgttcctagcccaaaagctcttagacaggggctctgccaacccagggggattccgtgttactcagacattggagtgtgaccattcatgttatatagatgggcccctggaaatccccatgataaggtacactctgattgcaggcagcttgaataggattctggctctgtagaattaaaccaactgaccagatggttagaagtgataacgaaactacccaagttaatccagggatactaaccacagtttctgtacagcttctgttttaattgctgccagtctatgcttttttacgcaatgcagacatgaaattccaggtgcctcaaatacttcacaaaatggtcagccacaaagcccagatctcacttcacagacagttgtgtggtagggaaatgagcacagaaggaacgagcaatgcacctggcagttcagaatcaatcagaagcaaaggtgagcaaggatcctcaagtacttgttgctggccaagtctcctttaactgatctgcagtctttccaaggattaagaagtaatcttccatctacacccaggcaccaggaaaaggacctagctcaggggaaatgtgtcagccaagtgaattagtcccactctgctgaacacaccaccctttgaacatctcgcctcttcctagattggcctctttgctgtcctcctgcttcactcttcatatacccaagacccagctcaaacacttctctttggaagcctcctctgagtcccccaggaaaggaaggcattcttaagtccttcatttatctctcgtgcaatgcccaccctatatgagctggcttcctttcctatctccccttttaaattatcacctcctagagggcactggccaagtttgttcatttctacatccctgctgtcagcacaaagaagcctcctctccaggcccccaacccccgtgatattttttgaatggctgtatatcaatcatttaattatgggatgaactattgttttagatcttaagccaagccaatagtgctccaattattttctcagcaaggaagtaacacaggagtcagttgcttcaaaccaaagcccagttatcagccgttcggtctctaggccactgaggagcagaggggatgccttgagacgtgcaaaagacttggggccaggtggcctgtgttcacatcccagctccaccaattatgtgcaagagaatggggtgagctccttaaactctcttaagcctcagtttccacatctctaaaatgggggtaattatccctaccacctaggacagttggggagatcaagggactcgtgagtgtgaatgaattatatcagtactggaagccttctgcttacttctgtgaaagagcttgtgtcccacacctgcttcccgtttttgtccgtaattagaaaatggcaggcaaattctctggagtgttacagcacttgggagcagcatccccttagggactttgggaaagagctcttgaggaagtcaagcattaggtattggaaaacaaaaatagaagaaaaacaaaaaataaactgaagcctacatttcaaaaatgaaagcaaaccagacttttatttttaatactgaagactataaattgtttcaccacgtaggtagatttcaataaatcagagataatgagatggtagaggaaaacatggggggaaacaacttacgaggttcccattatgagcccaacgcaaggctaggcattttcacatatattccatcatttaaccttcatgacgcccccatgtgaagaaataagagtcagaaccattaaggaccaggcatgtggtcacacgggctcagcagtggaacccggtttgttctgcctctagagtctgggttttttccactatggcattttcagaatggaaagactccaaggcagtcagcaagtcagcatagatttcctggtagggaagaggccaggaatgtcagtgtcagacccttctgaggtcaggcgctgaacttctccaagctctgcctttctgcagtttagatcagtcaacttcttaggggtcaaagtatgtgctttttgaagccacagccctccccgacatgtgcgtcagcagatgatggctgaacccaaacccttccctactattggaaaaacaactcaaaaagtctgcacactgatgaggaactctagagcttaatgttgatgtggaaagataatacatttttcaatttaagagtatgtctgagaggctaaaccagaaatgtgtaaatttggtgagactttaaacagcctgtgaccgacgggccaatcttcctcttttccttccagatgtcacactggatccttggcctccagggtccattaaggtgagaataagatctctgggctggctggaactagcctaagactgaaaagcagccatggacatggcggatgagccactcaatggaagccacacatggctatccattccatttgacctcaatggctctgtggtgtcaaccaacacctcaaaccagacagagccgtactatgacctgacaagcaatgcagtcctcacattcatctattttgtggtctgcatcattgggttgtgtggcaacacacttgtcatttatgtcatcctccgctatgccaagatgaagaccatcaccaacatttacatcctcaacctggccatcgcagatgagctcttcatgctgggtctgcctttcttggctatgcaggtggctctggtccactggccctttggcaaggccatttgccgggtggtcatgactgtggatggcatcaatcagttcaccagcatcttctgcctgacagtcatgagcatcgaccgatacctggctgtggtccaccccatcaagtcggccaagtggaggagaccccggacggccaagatgatcaccatggctgtgtggggagtctctctgctggtcatcttgcccatcatgatatatgctgggctccggagcaaccagtgggggagaagcagctgcaccatcaactggccaggtgaatctggggcttggtacacagggttcatcatctacactttcattctggggttcctggtacccctcaccatcatctgtctttgctacctgttcattatcatcaaggtgaagtcctctggaatccgagtgggctcctctaagaggaagaagtctgagaagaaggtcacccgaatggtgtccatcgtggtggctgtcttcatcttctgctggcttcccttctacatattcaacgtttcttccgtctccatggccatcagccccaccccagcccttaaaggcatgtttgactttgtggtggtcctcacctatgctaacagctgtgccaaccctatcctatatgccttcttgtctgacaacttcaagaagagcttccagaatgtcctctgcttggtcaaggtgagcggcacagatgatggggagcggagtgacagtaagcaggacaaatcccggctgaatgagaccacggagacccagaggaccctcctcaatggagacctccaaaccagtatctgaactgcttggggggtgggaaagaaccaagccatgctctgtctactggcaatgggctccctacccacactggcttcctgcctcccacccctcacacctggcttctagaatagaggattgctcagcatgagtccaattcagagaacggtgtttgagtcagcttgtctgattgaatgataatgtgctaaattgattacctcccccttaaagcgaacactgaaatgcaggtagacaattcaaagtctggagaagagggatcatgcctggatatgatctttagaaacaacaaaaatagaaaaaaataagtatctgtgtgtttgtgtattgaaaactcaatatgtaatcttgtgtttttatatgtatacttgtatattcctatttattctctgtataggcattacctacgttcctgtgtttacatacacaagtagcaaattcgagtatgcatagtgtagatggacatttgccacaacacactgcccgcagaaatggacttaccgtgaagccaataaagttcaagcttcagggatctctcttgcacgggccttgccaaggcccaggagggacttgggcagtatgttcatgtggtcatatgtttttgtaaaaaattgtgaaagtaagatatgtttgtattgtttttcttaaagaggaacctcgtataagcttcaagcctcacaaaccttctagcctctgcccttggggatttgcttcattaatttcaggcaagtgaggtcaatgtaagaagggaaagggagaagatatttgaagaaccagaatgtaaattcatgtgtttccacttctcagatatagtcagagaattattcatttgcccaaaaggacttaagtggttgtggtcatccatcattgtatttatcaagacaaagccaactttgttataagattgcatttttttcttttcaaattgctttagtttttcttagggagctatgagggggaaaaatcactaacatgaaaggcaaaaaatggactatgattcctgtggggaaacaatttcattctctccatcgtgaaaataagtgaataagagtgaagcaaaattacacctttatgagaaaccataaaattgtttttatttttcaggccagacatagcttcctaatgaaagaaaatggaaatgtaattcgacgactcctcaaaggggactttagaggacttcatacaaagctgggcattaagaaaaccacaatgcatggccgggcgtggtggcttacacctgtaatcccagcactttgggaggccgaggtgggtggatcacccgaggtcaggagttcgagaccagcctggccaacatggtgaaaccccatcactactaaaaatatgtaaattagtcgggcgtggtgtcacgtgcctgtaatcctagctgctcgggaggctgaggcaggagaatcacttgaacttgggaggtggaggttgcagtaagctgagattgtgccactgcactctagcctgagcaacaagagcaaaactcagtctcaaaaaaaaaaaaaaaaaaaaaaaaaaaaaaaaaaaaggaaaaccacaatgcgtactaaagaccagaagacattgttcacaaaacaaaagcaccctcacctgccaatgaatatgcagcgtgcagggggtgtggtgtgagtgttggtggggccccacctctcggagatactgctgtgctgccttcctcactgactgtatacatagtaactgtcatatctttaatgccatggactcactgagccgctctgcaaggactattgtagacaggcacttcacaccataaagtggcatttttttcgttccccaaactgacatttacaagcgataagaaaagagacaatatccatttcattgactgatcattttctagagtatgaagaaatacacacctgggtgtctgcaaggatgtcatcatctttgggtttcatctgagagcatcactcagcatctcacacatagatgttaccatatttttaaatgagctttcctcatccggctccctaagcaagcgctgttggccggtgggagtgactaagtgctccacctgtgggtgtccttcttaatgtgctgcttttgttctgtataaattcacaccacctcactcccaaaagtacttcctgtggctcagaaaaatatgttcaataagattttggatagataaatccatacaaaaataaaaagaggtatagttataaaacaagactacagaaaaagttgtggcagaaattgcatgcaggaaaatcccacaccattagtaaaagtaaggtcaactgtaagttcagctcagggcttcctagcagccatgtttagcgaagtgtgatttttttttttaaacaaaaacaagcaaagatttggaagaaaatgctttagacctaactttacaattattataacataagatgttccagggtccttgaataaatgctgagttttagggaaatgattccaagggaccaagaattggtagaaataatttcaaggcagagaagactaattctacaggccgggcgtggtggcttatgcctgtaatcccacactttgggaggctgaggtgggtggattgcctgaggtcaagagttcaagaccagcctggccaacatggtgaaaccctgtctctactaaaaatacaaaaaattacccaggcatggtggcgggcgcctgtaatcccagctacttgggaggctgagacaggagaatggcttgaacccaggaggtggagattgcggtgagctgagatcgtgccattgcactccagcctgggcaacaagagcgaaacttcatctcaaaaaaaaaaaacaaagactaattctatagtacccatgaccctgcaaccagagaaactgcctgtagggaggccagagtccaaagcagccacctgtaacctgaaaatgaaacgcagacccaggcatctgtgggtcttcatcagcaggatgaccattctaaggctaaaagacaggcctttaaatctgatgctataattccatccaaatacacagttaggtttctaccatagggaaagctattctctactttttgaagtatctgtttcaaagataacttgctctctggttctcttttatctaaaagagagaatcaacatgctaatttaaaggttaacatcattttaattcaaaaattttagtctccattccatatttaatgatgaagacaaatctgctgggtgctgggagggaataaaaagtaatgcaccccattgatttcagagtatctgatcacttgggttatgcaagctgctacttacccgccattagcatgggtagttaagtgctgattaaacctaagtggactcagtgaaaaagatattgggaaaaataatatgatattgtggcctatgttgaatgatgttagcttgtgtttcagtaacagagttgggtaatactggacgtgtagatgaagctttagcagggctgggcacggtggctcatgcctgtaatcccagcactttgggaggctgaggcgggtggattacctgaggtcaggagttcaagaccagcctggccaacatggggaaaccctgtctctactaagaatacaaaaattagctgggtgtggtggcgtgtgcctgtaatcccagctactcaggaggctgagacaggagaatcgcttgaacccgggaggcgaaggttgcagtgagccaagatcgcgccactgcacttcagcctgggtgacagcacaagactccatctcaaaaaaaaaaaaaaaaggaagaagaaaaagaaacttaagtggggttcatacatagcatggcagagggacactggagaataaaatggcatgcagagaggaacacgcgggccagtggatgaggcttctagacctggcagtgaactggagtctatttgcttacacaaatttaaccttctctccatgatggaatacaagtgtttcttgccaaaactcgcagccccagctgccctagatgaggagcaccgtgctggaaaagtgcacaggctgatcacagagacaggtaggaagcaatggactgttaaaatgcatgttccgggctggggatggtggctcacacctgtgatctcagcactttgggaggccgaggctggggaatcgcttgagcccaggattttgagactagcctaggcaatatggtgagaccctgcccttaaaaaaaaaaaagaaaagaaaagaaaagaaaaaaagattcatattcctgatcagctctgaatgtgactattcaatgaagacagtaaagttacagtgtaaggcacacatgacctttggccttgctaaagaagagtggctgaaggtctagcaaattaatgcttgtcttaggttacctgttgatttaaaaacaacaacaacaaaaacccataaaaatagtaaaatataaaaacaaattagtgttttatagaccctggggaaaagaattttcagcaaagtacaaaaatttaaagcattcctttctttaattttgtaattctttactgtagaacagctcaaaatatcagttctgttttaagtaacagaattgataactgagcagggaaacgtaatttggattgtaaaattcttgctttaataaaaattctttaaacagtcaaaatagaaagaaagaaagaaaggtggcaagagaattatcaaaagtttccatagatggttgggaagatctgattagtgtttccaaaatgcttatcattctaagaatcccaatagctggcaagccaagcagtggaacttatagtaacaacaatcaatcacttgtctcatcccacatttttgccaaattcaaaaacaccaaatttcccatcaaatgttctgtcagagtaaacctttacctaagtgcttgttttgcttttaatatgtgaatttctgggaacattcccatgggcagcctctaattttttttttttttttttgagacagagtttcgctttttcacccaggctggagcgcagtggcacgatcttggctcactgcaacctccacctaccggattcaagtgattctcctgcctcagcctcccaagtagcagggactacaggcacgtgccaccacgcccagctaatttttgtatttttagtggagatgggtttttgccatgttggccaggcaggtcttgaactcttgacctcaggtgatccgcctgcctcagtgtcccaaagtgttgggattacaggcacgagccaccgcgctcagccaatttttcctcaactctctctttcctggacgggctgcgttggggggaggtgcagggaaagaacacctctttgcttagacattggtgtcgacagtggggatactaagttcatctcctgatcctgctaggcctggaagcaggaaagaaatgtcctggttagagataaaattgttctatccttttagaaaagcctgttaaggaatatgatgcaaagccaccttcgacgaaatctgaaatgataccccacagccttgtccaccccaattattcagtgacagggctccagttgcttaagccatagagaaggcccctttgcagtgggagtcactgaagacagaaagggaagcccaggatgaacccagtcctaagggctgctgggggccaccaaataagactgttttagccctggacacagagggagacacagtcatcccagatccttacaaagaatacattgccaaggaccccgaaggaaatctgcttgtcttaagagaggaagacccacgaccagctctctgggactacctgtcaactcagcaggtgcagccagggagcagccatgcttcttctgccctcccagtaggctgggctatcagttcctgggaggggtcctgtccccatgtaaggggatatgtacattgctgagtacgctgatatctttttcatgggtatgattttttaacaagaaagctaaatggttctcgtgtaacataactgatatagtttggctgtgtccccacccaaatcttatcttgaactgcagctcccataatccccaggtgttgtgggagggacccagtgggaggtaattgaatcatgggggtggttaccgccatgctgttctcgtgatagcgagtgagttctcacgagatctgatggttttataaggggctttccccctccttcgctctgcacttctccttgctgccatgcgaagaaggatgtgtttgcttccccttctgccatgattgtaagtttcctgaggcctccccagccatgttaaactttgagttaattaaacctctttcctttataaattacccagtcttgcgtatgtctttattagcagtgtgagaatggactaatacaataaccaaggcttggtggctttctcaacattaaccagcatcccagttctcaggagacatggatggtgttctaaggctctcaagttcccaacttgtaccttcactctagtttgtgctcccaagcacatgcacacataaacacacacgtaatgtacatgcatataggtggcatgacagaacacatgtgtgatgcttcacatgtatgtcaccctccccttgtccactgccctgctccagcccatttccatggctcagtctacatctgctcatcttgtttgcttaagtaccatgcatgtgaaagacatgctcacgtgtgtgtgatattcatgcacatacatgttaggcacacgtgatgcacatgtgtacatgggaggcatgtgtgtgatgtgtacacacagtatacatcctgtattgcctcggcaagacctcaatgcagagattctccagcagctttaaacagagggtgataaatataatttgactaactcatctcaaatctagggatagttagtcttttttttgagacagaatttcgctttttttgcccaggctggagtgcagtggtgcgatcttggctcactgcaacccccacctcccgggttcaagcgattcacctgcctcagcctcccaagtaactgggattacaggcatgtgccatcacgctcagctaattttttttgtatttttagtagagacggggtttcacctcgatggccaggttggtctcgaactcctgacccccaagtgatccacccacctcggcctcccaaagtgctgggattacaggcatgagccaccccgcctggccagttagtcattttttctagactgctgccacgatagggaggaggacattatgcataaactagttttttacccagagaattccatgctagatcacagactgcatgcctagcatgcccagccccagccagctgtccctgcctcaattcaacaccaccagcaaaaagggttggcaaaagggtgtgacggcttcctgcaaatcacccccaccggtccattggcatgaagcacttgtactgctaacagcaacatttttgcataagaaaaatgatacaatttcttcatagaaaaatcactgaaaataattcttaaattgagtctcatcaatgacagcatcttaacagacatttcttccccctggtcccccggaccatgcttcttaatacaaatccaaggctgaacgctatggggaagctgtgatactctgccagtgagaaaatgaatggccgctgtcttccttgcccgtgagcacacctccgcaaaagagtctcttaaacagaaaggaaaccttccctttgtccatggtcctgcttgttcatttccgtggcttgggatatctaccttggctcatcttgtttgcttaagtatcagccagtgtgtgatggagaagagagtattgttatgtcttcctctgaggaacagaagtctgatctccagggttcattctcaagattaattaaagctagcctagtctcagctgtgctgccagcccagcgtgctagacactcacagagcaaaggcttgggtggaaggaagacttactttttttgccttcagcttaagcactttttggcagatgaaaatcctgtcctaaatatctcttccaaactcccaggtggatgggctcgggagatgacagaccacagctgttccactttttttctctgcaccttcacgtgaccacctgtctccaagggtttgcaagctcaaaggtagcagaacatgcaacttcagccataccatgtggcctcctcgaaggtctgtctttgcagcccaggaaacctattgcttcttggttttaaatggaacatttctagtccagctgagccgacacaaaatctggttggatatcagtaatatggttctgggatgttgggcagacatggaaatgggtatttacagagtttgggactttgagggcttccttcctgcctccaggaccaataaagtaaatgttaattgctggagaagaaccaaggtgaggcactgatgtggcaggctgcttcagcagtgacgtctgttttcagagatcagcttcaccttagagagtgtcaaggtcagtggaggcccactttgctctcagcaaagtcaagacaggagaccagctgcctttgagcagggagtctcacatgtttaaaatttagcaattagagtttgtttcctttaactatgcccttgatctgtctttcaaaacaatgtccccttatagtttatatttaaaattttaacttcagcactttggaaggccgaggcaggaagattgcttgagcctagcagttcgagaccagcctgggcaacacagaggaccctcacctctacaaaaaaaaatttaaaaatcagccacgtgtagtggtgaacacctgtactctcagctgcttgggaggctgaggcaggaggataacttgaacctgggaggttgaagctgcagcgatccacgattatgccattgcactccaacctgggtgacagagagagactctgtctctaaaaataaaatataaaaataaaaataagatacaaatttaaaatgcctttctatttttatttatttgagacggagtctcactctgttgcccaggctggagtgcaatggcgcgatctcagctcactgcaacctccgcctcccgggttcaagaaattctcatgtctcagcttccccagtagctgagatgacgggagtgggccaccacatccagctaatttttgtattttagtagagacagggtttcaccatgctggtcaggctggtcttgaatgccggacctcaagtgatccacccaccttggccttaaaatccctttttaaagaggcatttgagaattccacaatatttcctttaaacaactcgaaagggacactttgttttcataaaatgcggttgggaagcaatttcgaaagagtcaacaaaggcatttcatcccagggtggatggagcagagccgggtctcattctttttctccatctctccctccttttggtcttgcctgccctttgacagaaacaatttaatatgtagctgagcaggggaaaagggctcctagttagaaaagccagttaagacagggttcccattaacttggaggggtcaaccagccagcttagccagctcacagaggtctcatatgcgtgctctgattgccaacaaaaagtagcagcagacaattcaaggggaaagacccagggaagtctccactccagggtctaacaacctgagagccatctcatcagtaaagagcagggcgtggagtacagggagctgacatttagactggttaaaagctagtataatctgaacagcgcattgttcctgaagcctacctactcctgatttcatagctaatctatccatcactctctggctgtcactcacccataaacaacagtggatttttataaacagtagatcaatcatgatcaaaggaaactgaacactctttccacatggctcccacacacacctcaccctgctctgtccttttgggtggtgccgagaagcctttgagatcaccccagtctttgaggactaaatggagacaaggaagcttgggacatccaggaaaagtcttcagcagccctgactgcaaaaacagtttcaattatgtgatgtgattggtggttttaacatgtcaagagtaggtgtgcacatggtccacagctagaatttttattattattattattttttttttttgagacagagtcttgctctctcacccagactggagtgcaatggtgtgatctcggctcactgcaacctccacctcccaggttcaagcaattctcctgcctccccagtagctgggattacaggcacgcgccaccatgcctggctaatttttatatttttagtagagatgggttttcactgtgttggccagactggtctcgaatttctaacgtcaagtgatccgcccacctcagccttccaaagtgctgggattacaggcatgagccaccatgcttattattattattattattattattattattattatggtatttttgaatgtaattattcttaataatatgtcatctctgcatgtccagtatttcgataaaacagttaaaactgcatttgccttctaatgagactttgtgactggctgtgtttctctgtcagatgaatttaccttcctatttgctgttaaaagtgattgtataatcctaatcctagaaaacaagcagcaaatgtttctttttagtgactttttaaaaaatttacaagtgtaccattttatagctatcttcacacaaaatcacattctcaatcaaagagactcagatcgaagtttgttcattaggccagctacgtgaactcacctctgtcccctgcctctgaaaaatatcctacatgctcaggaaagagggccagagtcctaagtgacataacctacactttctaagttccctaaagccctgaactagaaataggctttaaaatttcacaatttgttttaaaactctaagcccaacagaaagcctacaaagtcttttctagatgttaccaaggtcttggctatcacttgtctgagagcaaaagaaaaaaacaaaagaaaaaccttgaaaattggcaactactggtgaatcccattttgtccacagactgattttttttttttttttaaagacggtgtcttgctctgttgcccaggctggagtgcagtggcatgatctcagttcactgcaacctccgtctcctgggttccagtgattctcctgcctcagcctcccaagtagctgggattacaggcacctgctaccatgcccggctaatttttttgtatttttagtagagacgggttttgccatgttggccaggctggtctcaaactcttgacctcaggtgatccacccgcctcggcttctcaaagtgctaggattacaggtgtgagccaccgcacccagccacagagactaatttttaatggccccatctggtctcttccagattttgtagcctagtttaaacagaatgtctaagtcatcgtcaagcagatgacaaaagggtgccctaaaagtgccataaagatgcaccaggtctcagtgatagcaaagctgactatagacaaatgcccagagtttagaaattaggcccccaaaaccaacttgttaccatcttctcatctttcactcaaatccaaaacataagaaaattccagttgcttaagttagagtaaatcagacgctaacatcagaaaaaaattagctggttgttcactatgtaccaagccctgttctaagcacttaatatgaatcatctcattcaattcccataagagctctctgaagtaagtgctacttttattcccattatacagatgagcaaactgaggcatagcatacttgagtcacttgaccagaacctgcactcttttttctttgtttgttttttgtttttgagacagagtcttgctctgtcgcccaggctggagtgcagtggcgtgatcttggctcaccacaacctctgcctcctgggttcacgccattctcctgcctcagcctcccaagtagctgggactacaggcgcccgccaccacgcccggctaattttttttgtattttttagtagagatggggtttcaccgtgttagccaggatggtctcgatctcctgacctcgtgatccgcccacctcggcctcccgaagtgctgggattacaagcttgagccaccatgcccagccagtacctgcactcttacccacttctccacattgcatgaccacctacagaaagtgtgagcttgagcaagtgcctgaccttccagagaccatgcttcctcgtttgcaaaacagggataacaccaagtacctcaaggaattctgtaacgatcagatgaaaagaaatattgaagacaatttgtcacattatcagacaaagagaggtacccagtacatattagcatcccttcacctttaatcagagcaaaagaagaccagaaatgttttggttgttaaacagctgatcattttccaaaattgctaatattaaactacggcttctaatcctgccatcggtagaaagcttggccagcactaacaaaaccagccatgtgacgcaagatgaaagcaaatcggagtgcagaaaagtaaatgcaattagctggctacctgataaggtggcacacgctgcacaaagagtgttcctttctggctagaggactttactcctctgttaaccctaattcaatggtctctaccacacgggaccgggaataaacttccatctccctaaacagagcttcatcgtcttgccaaagcattctggaaacttagcagttcgtggtatgttacaaatcgctgagctcttttcctcctccctccagtgtgggaccacggttggcctggggcctggcgctcaccatagagagaggagcgtgcagtgaatcctgggtttatcaccatctgcactgctccagggtccagctggagacagatggcacactcgcaagggcttagttgaaatgaatggaatgaaggagctacatacagaggtgggggcaggtgcaaaggagccaccaagagacggatgaggtgcctggagactgggcatgggaataagggaatacaaaggcttaaaagggacagaagccttctctaactccataaggaacattcaaaagtccagacttcacattgtttgacggggagggaagggctgatgttagacatgaatataaatatgaatgaattcagcatttctgaaactagactaaatcaatctggtcattttctttctctcatttaagaattgtagggtaacacgtagttggaatatttacggattttttttttttagcatatcaggaaattaccttattacaaagctaaatttgcgttcaggcactcaatgattattgagtgtctactgtgtgacagagattgttttagaagctgagaatttagtaagaaagacaaaaggtagagcagaagacaggtacagtggtgcacgcctgtagtcccacctacttgtgaggctgttgggaggatcctttgagcccagcagttcgagaccaacctgggaaacacagcaagaccctgtctctaaataaataaataaataaataaataaataaataaataaataaataaataaataaatgaccaggtctctgctccttgttgtgagacactcaacaaacacacataaatagatgaacatgtaattccaataccgtgacaaacgctatgatgaaaatgcataagcaggccaggcacagtgagtggctcatgcccgtaatcccaatgctttggggggccgaggtgggcgaatcacctggggtcaggagttcgagaccaacctggccaacatggtgaaacccgtctctactcaaaacacaaaaattagctgggtgtggtagcacacacctacttgggaggctgaggtgggagaatcacttgataccaggaggtggaggttgcagtgagccgatacggcgccactgcactctagcctaggtggcaccacggcactctagcctaggcgacaagagtgaaacgccctctcaaaacaaaaaagaaaaagaaaatgcataagcagtaaagagtgggggtcaaaggcctgggtttgagagccacacagctggtttatatctcaactctgctacttcctcaatgatttggggcaaattacataacctcccttggccccagtttcctcctcagtgaagtggagataacaacaggatctgaagcacgcatggtggctcatccctgtaatcccagcactttaggaagccgaggcaggaagattgcttgagcccaagactttgagatcagcttaggcaacatagcaagaccttgtctctccaaaaaaatagccaggtgtgatggcacacacttgtggtcccagctactcagggggctaaggtgggagaatcacttgagcccaagtggtcaaggctacagtgagctgtgatcacaccactgcactccagcctgggcaacagagcaagaccctgtctcaagagaaaaaaaaaggacaggatcaagatagttcactttcaaggtttataagagtgataacagtggctgacatgtattgagttgttgataaacactagcttttattattttagatgggtggttcaggcaggcttcttggaggaggtgactgccatatgaagatctgcagaagaaacagcacaaacaatggctttaggaaggagggaaccaaagcttgtttatgaagcaggaagaagaccagggaggccagagtagagtgagggaggaggagagtggggtgagggaggaggagagtggggtcaggtagggtcaggccacgcagggacttgaaggtctttgatgggagtttgcatctggccaagagggatgggcagccgggggaggttttaagcagaggatacacaaaacctggtttccacttttaaaagtcggctttgtagcaaggagcatgaactaaaaggggtcagaagtagaggctgggtacggtggcacacgccaataatcccagcagtttgggaggccgaggcagaaggatcatttgaggccagaagttcaataccagcctgggcaacacagtgaaaccctgtctctacaaaaaattcaaaaattaggccagatgcagtggctcatgcctataatctcagcactttgggaggctgaggagggcagatcacctgagctcgggagttcaagaccagcctggacaatatggcgaaaccccttctctaccaaaaacacaaaaattagccaggcacagtggcacgtgcttgtggccccacctactcgggaggctgaggtgggaggattgcttgagcctggaggtggaggttgcagtgagctgagatcctgccactgcactccagcctgggtgacaaagtgagaccccctctcaaaaaaaaaaaattaaaaattagccagttgtggtggcacacacctgttgtcccagctactcaggaggcttaggtgggaggattgcttgagcctgggaaggtcaaggctgcagggagctgtgattgtgccactgcactccagtctgggtaacagagcaagattctgtagaaagaaagaggaagaaagaaaggaaaagaaaaagaaaagaaaagaaaaaagaaaagaaaagggccgggcgtggtagctcacgcctgtaatcccagcactttgggtggccgaggtaggcggatcacttgaggccaggagttcgaggccagcctggccaacatggtgaaaccctgtctctactaaaaatacaaaaattaaccaggtgtggtagtgcatgcctgtaatcccagctacttgggaggctgaggcaggagaatcgcttgaacccgggaggtggaggttgcagtgagccgagatcatgccactgcactctagcctgggcgacagagcaagactccatctcaaaaaaaaagtaaagaaagaaaggatgagaagctgttaacctggaccagtggaaatggaaaaagagcaggggtcaccaaaccatggtccaagagccaaaatgggcccttcgcctgttttattaaatacagttggccctttcagcaacacgtgtttaaaccgcacgggtccatttttttcctgatttttttcaaccaaacagtgattggaaatagagaatttgtgggatgcaaaacccgtgtatatggaaggtccacttttcatactcacaggtttcacaaggctgaccgcaggtcttgagtgtgcacgaatttggagatatacaggggtcctggatccaatccccctcggatactgggggatgcctgtaaagtcttactggacacagccacacccacctgcggatgtgctgcctgttgctgctttggggcgacaacgggcttgctgaattgtgttgacagagaccgcaaggttggccgggtgcagtggttcatgcctgtaatcccagcactttgggaggctgagatgggcggatcacctgaggtcgggagttcgagaccagcctggccaatatggtcaaaccccatctttaccgccaccccccccccccccaaaaaaaagacagagactgcagggtctgcaaagtccacttactatctggctctttatagcaaaagctcatccatctgtgttttggaggaagagccgatagggcttgtgaaagcactgggtatgcagagtgagagagagatggaagacttcctgagtctgagccatgaatagctgggcggtgccatttcttgagataggaatgacttggagtgagggcctaggagggacactaagaagagagttgttattctggatgtgttaaatttgagatgtctcttagacatccaaatggagtttcttttcttttttggagacagaatctcactctgtcacccaggctggcgtgcaatggcacaatcttggctcactgcaacctctgcctcctgggttcaagcaattctcctgcctcagcctcctgagtagctgggactacaggtgcccaccaccacgcctggttaatttttgtatttttttagtagacacagggtttcactatattggccaggtggtctcgaactcctggcctcaggagatcctttgggaggccttggcctcgcaaagtgctgggattacaggcatgagccaccgtcgccggccccaagtggagtttctaaggaggcagccagatgtacaagacaggagtataggcgcaggaggaacaaatgtaggagtttctgcaaacatgcctgcctggctgtttgctgaaggcagagtctcaggtatctgcaaacagttaagtcaaataaccaccgcttctaccacaaatgtcacctccagtagacacaggctgataaacactgccataaagataagatgtcaagacaactacattagggctctcttgatcccattggcatctcagccaagagcaaacaccaactgtccgaatcccactgagcaatagtgtggaattcaacctcctgtcctgccccggatgttacttttattgacagtgtatcccttacaacatcaaatttccctttctttcctcccctgtttgttaatttgtgatcaatttccaatttcctctcctttccttttttcttccttctcgctttcaccctttccatttctcctagcttagctagaattaaatttcttattttcattttcctgggtaattttgtctctcccatttattttctcttctccaggtatccccagctttaattccctcctaagtttatcagagaatgacccttcgtccaacatcatcagggcccaggtacaagattcagcaggttcactcttcagagtctatatggacgtgccaaaaacgcagccaccttacatcgaagaggaggtattggaagaagggttgaagtggatgtgagatgagatgggtgagaattgtcttactgcttttattatttcaattagacaactgagggcgaaaagcccttgtgccttttccagtgcatcctttgtgtagacactgtgattatgtaacatatatgcttggcatattttgcaaatatttattgaatcatttggtttgacagccaagatctatgggacccatgctcccagatgctagatcacagattgcataaggaaagaacatgtggtgtctacaaaatctgcaatgttgaaactctccactttgggcattatcctggcttgctttctatatttctattaaaaagtaaagagagctgggtaagtggctcacacctgtaatcctagcactttgggaggctgaggcaggaagatggcttgaggccaggagttcaagaccagcctggacaacatagtgaaacccccatctctacaaaaaatttagaaattagctggatgtagtagtgcattcctgtggtcccagctactccagaggctgaggtgggaggaccgcttgggcccaggaggtcaaggctgcagtgagctgtgatcatgctactgtactccagtctcaaataaataaataaataaataaataacaggagaaatctgtctgctcaatgttctgaataagactatactgatcaggactgggcgctgtggctcatgcctgtaatcccaacactttgggaggctcaggcgggcagaccacctgaggtcaggagtttgagaccagcatggccaaaatggtgaaaccctgtctctactaaaaatacaaaaaattagccgggtgtggtagtgcgcgcctgtagtcccagctacttgggagactgaggcacgagaactgcttgagcctgggatgggaaggctgcagcgagctgagatcatgccactgctctccagcctgggaaacagagtgagactccgtctcaaaaaaaaaaaaaaaaaaagagtgtgccgatgggtctaaagaaactaaaatgtcagaatatatccactgtgttgaaagactgccctccagcatgcagatgcttggctaccaggcatggccaccccatgtgtcatctgcccccaaatcactggatagccactccaacttgggtgcccaaactgactgtagagacccacccttaggcagagatcaggaagcagtgtgggtaccatccgaatggtgctcagaattgtttgagccatctgtttcttgatattctgaaattttctttgaagctaataatgtgacaatgtagaaagatcaaggacttctagagccaggggatctgaagacaggcacctgtgtgaactcacgcaggttgcttgatgctaaaggttatcacacaacacacatgaactcatccctataccagaactaaactatggcaataaggcgaaaaggtgcctctttcactcaggtacctcctaataccttgagaaaaaaaggctccaggttctcatctctgtcttgctgtccccggcacagtgcctggcccggctgtggcagctgaggtctttgcccctgatccgtggttttgatggtcccagctgatatgcagaaggcagaggaagggggtggtgctgtcctgggaggcagaggacaaggaaaggagccatggagaggaaagagttaaagacacatttcctccagggccaggagcttttccagtgaccaggcagtcaggtgacagcttctgtcagtgctcagttctgcaggcagaggaacaacagtggcatcttcaggccagtcagatgaacttggccagggaaatacagaggaaaggcagggaacaccctgatttcaaaccacactctggactaggtgaggtggctcacacctgtaacccgagcactttgggaggctgaggtgggaggatccctctagcccaagagtttgagaccagcctgggcaacagagtgaggccctgtctttacacaaaaattaaaaaattagccgggcatggtggtgcacacctgttaatcccagctactagggaggcagaggtgggaggattgcttgagcccaagaggtggaggcttcagtgagccgtgattgcacccctgcactccagcctgggcaacagtgagaccctgtctcagaacacacacaaacacacacagacacacacacacactgcagtgttgacagctggccagtttgtcttttctctacctgactcagaacacacacacacacacacacacacacacacacacacactgcagtgttgacagctggccagtttgtcttttctctacctgagcttacaggtattgtgcacaagcgcaaggaccatcccatacaaagccctgggccccccactatccctgatatgttgacatttctccccttgctgtaagaaaggcttcaaccaaactctcatggagctggaaccttagtgcagtgtatatcagttagggctagggcaaaccagggaaaccgattttgattttcaaagaaacaaaattgatcagtaagacactgcacagttcatagaatctctgggaaagatggggaggcaggttcaggggacaggcaggaaggaaggaagggaaacagaacatttaaaacctagacgagcacaccacatggtgattctgtcgaggacgtcattgtgggtgcccacggctgccaccagcaccaccgccagcattagcagctgggagctggagctaagttcactgcccttgctgtccttagggagtggatgttgccggtgatacctgtgccaccaccaaaatgcaatcgcccctgtcacctgcgatttttttttttttttttttttgagacagggtcttgttctgttgtctaggctggaatgcagtggcccaatcatggctcactgacgcagtctcgacctccagaggctcaagtgatcctcttgcctcacttgcctcttgtcaagtggctgggactacaggtccacaggcccacaccactactcccggctaattttctttttctttttttttttgagacggagcctcactctgtcgctcaggctggagtgcagtgtctcgatctcggctcactgcaacctccgtctcccaggttcaagtgattctcctgcctcagcttcctgtctgctgcctcagcctcccgagtagctgggattatagatgtgcgccaccacgcccagctaatttttgtatttttagtagagacagggtatcaccatgttggccaggctggtctcgaactcctgacctcatgtgatccgcctgcctcggcctcccaaagtgctgggattacaggcatgagccacccggcgcgcgcccctttttttgtatttttttgtaaggacggggtttggccgtgttgcccaggctggtcttgaactcctgggctcaagggatccacacgccttgggctcccaaagtgctgggattacagcctgcttcttaatgtcactaactcttcacccaagtcctaggcgcttgtgcctgctgtgccagtcccaggccgcaggctggcaccgtagctataaagggcgccagaaaaaaagattttgctagatagcgatgaattccccaatcacagaaaggagatactgcggatgcttatcagccgaataccagtaagtgtcccttgcagaatgggattagagactgcaaactgcaggcctgccaacagagggtgctctgtgggaaattatgtgaaaacgtagaaaagagcgcgagccagtaatttaaaaatcgacgtccaaatactcactgggtcacctatcagctatgtaatttgggcaggtaaataagcttttgtttcttttttttttttcctcataaatggactaggaatattactcctacctacctggcatggccgatgtgcgagaaaatgagataatctcgtggacaggctctgaaaactgcacttttactgagtaaaaaaccctttgcctctccgggcccccgtttccccatctgtaaaatgagtctgtaaagtgagaatgatactccctacgccgcaaggctcttgcgggttaaactggaatattataaatgcaccatttatttgcagattgaaattctgtgcgtccggaggtggcgggtgggagagggaatgagcagggatgcagggtaggccctgagttgctgggggctcagcatggccgctgcgcacattgcatcattttgtcgacactggtgtgggtgaaatcttccaaaagaaattaaaacagaaaaaaaaaaaaagaagggtctgggacttagcagaaacaagccacaatctccagattctactattcctgggccacgtgaggagcgcccacccgtctggcgctgcgttccccggggcgtcccagcctctcccgcccagcccgccgccctcctcccccatggccaccaaggtcaggctctcgcagggaaaacgtcttcaggggctaaacatcggttttaaacgaaatggaaaacctccaacacgaatcaacagcagaggaaaagcagacgccaaacaagcgctcagaaccccttcaggggcggcgtggtagctcttcccggggaacagcgaggggcgcggatgtccctcttcctaaaactgcacgcggggtgcgatccgagacccagcggcggcgagcgcgcccgagtctgctcgcgggcgccaggcgcgcggagagcggcggctgcgcctgcgccaacgccgtcagtccgcggggcccgatcccgacacctaactccacagagaagctctgctcctaagggaaagggaagacttcagccacagtttcgcagccaacctggcgacctcacctctctggcgacctcacttcccagccggctccgtttaagaaaaccccgcgcaggaccgcgcccgcccccgcgcccgcgcccgcccccgccccctcgcgcccgccccctcgcgcccgccccctcgcgcccgccccctcgcgcccgccccctcgcgcccgccccctcgcgcccgccccctcgcgcccgccccctcgggtaacaaacatggcccccggcggggcggaagcgcttccgcccccaacgaagatggcggagggggcgggactaaaagggcgtaggtagatcgccgggggctgacgagtgcaccatggccaccgcggcaacctcacccgcgctgaagcggctggatctgcgcgaccctgcggctcttttcgagacgcatggagcggaggagatccgcgggctggagcgccaggttcgggccgagatcgagcacaagaaggaggagctgcggcagatggtgggcgaacggtaccgcgacctgatcgaggcggccgacaccatcggccagatgcgccgctgcgccgtggggctagtggacgccgtgaaggccaccgaccagtactgcgcccgcctccgccaggccggctcggccgcgccccggccaccgcgggcccagcaggtcagtccccgtgcccccaccctgcgacccgcaggcgggtcccggagcccctggccttgcaggtcaaccccgcccccctctgtcagtcccagaccccgcgagtcctcaccttccttagccaggagcctatccgcccctcaccctttgggcccccctcagaggacagtgccagccttccttgcacatatgcggctgctgatccgttctggaaatgccattcaacagtttcttcaggcgctttcccccgacttccgggccttgattcctacacctcactgggctcctttcaattttagcggaaaacgccaggagtttctgtcttgacagttcaacgctcacctatataacatgtcctgacattgtttttcctcaggtttctcccctatgttgacacctgcactccaagtcatttcttcctcatcccaaccttccccttatctccccaagaataacttccacaaccccaaatagctgttctaccctttgggagttgttgagggtaccagctatcaagcccttaactttatgtatgtatgtgacagggtctcccaaagtgctgggattacagtcatgagccaccacagccggccaagcccttaccttttaatagctgaacattttcattttcagaactaaggcttttttcattcaggttctccttatcccgtgttcttccccccaaacgctattgattagacacaatgaggaaggatgggaggtaaacaaacacatcctcatattggagctgcagcttgcgttcctaaagaatttttattggccgggtgcggtggctcacgcctgtaatcccagcactttgggaggccgaggcgggtggatcacgaggtcaggagatccagaccatcctggctaacacggtgaaaccccgtctctactaaaaatacacaaaattagccaggcgtggtggccggcgcctgtagtcccagctacctgggaggctgaggcaggagaatggcatgaacccgggaggcggagcttgcagtgagccgagatcgcgccactgcactccagcctgggccacagagcgagactctgtctcaaaaaaaaaaaaaaaaagaatttttatttctttattttttgagacaggatctcgctctgtcacccaggctggagtgcagtggcgcgatctcggctcactgcaacctccgcctcccgggttcaagcgattctcctgcctcagccacccgcgtagctgggattacaggcacctgccaccatgtccgactaatttttgtactttcagtagagacggggtttcaccatattggcccggctggtctccaacccctgacctcatgtgatctgcctgccttggcctcccaaagtgatgggattacaggcgcgagagccaccgcgcacggccccttaaagaatatagacctagcaatgaacgaagtgaaagggcatgaagggtgaaaaaggtaaacagttagttgtttttaacagcctgggagaacttactgggacatagaagaaaaaattgaaaagtacagtctaactccaatttggaacttgttcatgctatctgagctttacagaaatcctggtcagtagactggactgacacaataaaactataggaagttgcaaataagtttgcatatttttgaaatgagtgacctcatccctcccaaagctaacatttagtacacgtgtccccttaggtggccagcctttgctgtaactgagtcatgcttcagggtttattaaaacgctaacttgaattatgcctgattttagaaacgtattgattttcatagttgttatatctggtttattctcggttaaccctacaaaaatttgagtgtcttcttcgttcacattacaaagaaacagaagtcccccaattcctgctctgaaggagcttacaacctggtcgaggaaataaatccatggaaacttgacgagaaaaaaatgtaaaaaaatttagaataacaggtcaggcgctgtggctcatgccagcactttgggaggccaaggcaggtggattgcttgatcacaggagtttgaaaccaacctgggcaacacggtgaaacaccatctctacaaaaaataccaaaaagtgagcgggcatggtggcacatgcctgtggtcccagctacttggaaggctgaagtgggaagatctcttgagcccaagaggtcaaggctgcagtgagccatgatcgcaccactgcaccccagcctgggcaacaaagtgagatgctgtcccaaaaaaaaaaaaaaaaaaggctgggcgcggtggctcaggcctgttatcccagcactttgggaggctgaggcggtggatcacttgaggtcaggagtttgagaccagcctggccaacatggtaaaaccctgtctctactgaaaatacaaaaattagccaggcgtggcgacacgcacctgcgatcccagctactcaggaggctgaggcaggagaatcactggaacccgggatgtttgattcccaaaataattgtgtatatttaccctaggagttctgaaggaagtcagtttaggcttgggttgttcttagtaaggagggaccttaagggcatgatgagatttggaatttaggtttcttagtccatttgtgctgccataacaaaatacctgagattgggcaatttataacacaagtgtatttttcacagttgtgggtctgggaagtccaagattaaggcactggcctttgatgtctggtgagggccttcttgctgtatcctcacgtgggggaaggtagaagaacctaaaagttgcctccagcccttttatgaggcactgatccatttgctgtggtttggatttgtgtcttgcccacatctcatgttgaattataatccccaatgttggaggtggggcctggtgggagacgaaagtttgcctcttcgtggggctgagcaaaaatgcacgcgtgtgtaggaaaaaccatgggatcttacaacactcctgactctggcaactcttctacactgggctttgatgacttgctgagttgtactgaacccagcttaatagaagttttgtatccttaaatacccccagatttcttcctaagcctacagaacactgagattgcttttgttcgttcttctggtttagttctgtgccttcccctgcagccacagcagccatcccaggagaagttctacagcatggctgcccagatcaagctactcttagaaattccggagaagatctggagctcgatggaagcctctcagtgtctccacgccacacagctctacctgctctgctgccacctccacagcctgctccagctggattcttctagttcccgatacagtcccgtcctctcccggtttcctatactcatccggcaggtggcagccgccagccacttccggtaagtggatccagcgcaaagagctgctctggtggtggccaggcttcacattacgggtttatggcgtttgtcttctttcctgatgtaccaaagctctttacccaagatgtgaaaaacaccctggcgacttctgtcatcatttttctaggtcaactattctgcatgaaagcaagatgttgctcaaatgccaaggtgtgtctgaccaagctgtggccgaggccctgtgctctataatgctcttagaagagagttctcctcgccaagccctcacagacttcctgctggccagaaaggcaactattcagaaacttctcaaccagccacaccatggtgggtgtggcttctggccaacatttggtccttaaatatgggatggagaagggtgagctgcgggagactgaagcctccagagcgtcctctgtctttcactttgggaaaggtaattgtttcaaagaggatggtttcttcttttaggtgctggtatcaaggctcagatttgctcattagtggagttgctggccaccactctgaagcaagctcatgcccttttctacactttgccagaaggactgctgccagatccagccctgccatgtggcttgctcttctctactctggagaccatcacaggccagcatcctgccggtgagctcttagccaagctttttaaattctggttcactcaactgataatttgctcagcgtctaccgtgtgccagccaccatgctaggctctggggatggagcagtgaactggacaaatagaggcccttccttcatcgaggccacagttgagtggtagaagcaggtatcagactcacaaatatgcgaatatccatttagtgtctatattggtcattgctagaaaggcttagtacaagttgccttgggaacattgaatggaagtaactcaccaaggtcagagaaggcttccctggagaagcctttaacctgaaagctgaaggttgagtgggagtcacttagatgaagaaggcaagcaacaggctttcaggcaaagggaagaggatgtgcaaagatcctgaggcaagaagaaactgtaagacagccagtgaggcattgggtgagggggagagctgcttgagcagagactggaggtggggccaggggccagataatgcccagccttgtgagcgaggctagggaatttagactttatccaaagaacaatggaagcctcctgggaccttccaggcttggtgcggaccctctgttatgtgtgcccgtgcatcctgtacttttatttggtagcatttatcgcaactgaaatgaaataaatgaatttggcttttaggtggaatagatccccttggggctagaatggatgccaagagctcacttaggaggctgttgccacgatccaggtgtcagccgctgggagcttgggttacgaaggaacaatagagacggagctaattgcatgttcggacgtctgtttaggaggagaggatttggtgacagattggctgtaaggatgtgagaagggaggtgaccaagttaagtagaaatggagctggtttgaagtggccgatgatgggttcactttgaaatggcccagtgctgtggctcacatctgtaatcccagcactttggaagctgaggcagtccaggagtttgagatcagcctgggcagcatagtgagaccccatctctacaaaagataaacatttgctgtgtgtggtggcatgcccctgtggtccctgctatttgggaggctgaggcagaaggatcatttgagccagggaggttgaggctgaagtgagcagtgactgtgccactgctttcctgcctgggtgacagagcgagaacctgtctttaaaaaaacgaaagagagaaaacgttgcattggcgatggctgaggccttggaatgggactgtgaagcgggcaggtgcctgagggcccagaacagatcgctgggaggtctagttggagacacactgttgtacatctgcatgtggctgttatttcaagctgtgggaatggatgacatcatcagtaaggagatgacagaggactctgccttatggaactccagaaatccaaggtcaaatggaggtgtcagcaaaattgacaaaggagatacagccaaaggtagaaaggaaacagaagagtgcggtggtggccacgtggctgtttccagagagaggtgcttaatgtcacctcatcttggctcactttatctttcaactccacctccttatgcttcgctttccctcaaggtgcttacatttagtacctcatcccactcaggaagggtgggtactggctgacttgtcatggctttagaaagcagtacaaggggccttgggagggccctgggtttcaaactccggagggtgccttatgctcagaacacagtgaacggggcctcccagagttgcgcagtgcaggcctgtccccttcttgacaggtcacctctgaagagctatgaacgactcagttaatcaggataagcagtcatcgattctttccttccatcttcgggggaggtaggaggattgagaggaaagggaagccattaccttttgcttttttgacaacttaagttctactttgaaaacccccaggactgcatagcactcatttcttctttctactcttttgatccccgtttttgtttcctcccgatctttgccattcttctcaaccaacagaatgaccagagttgtggggcggctgccacactccctgatgggacctcacacgtgtcccgtactttctctttccttgtatttcagaagtccagtttgaccttccaaaggaaaacttgataagttttggaaatttcttctaagtccatcttttatttatttatttttttggagacagggtctcaccttgttgcccaggcttgagtgtagtggcatgatcatgggtcactgcagcctcgacctcctgggctcaaatgatcctcctacctcagtctcccaagtagctgcaactacaggtgtgcaccatgacgcctggcaaattgtttcttttttgtagaggtgaggtttcactgtgttgcccaagctggcctggcctaactccctgtttcaatatgcacttcaaagggtggcctagatggcttctcacttggccttctctttaggaaagggcactggtgtcctgcaggaagagatgaaactctgcagctggtttaaacacctgccagcatccatcgtcgagttccagccaacactccgaacccttgcacatcccatcagtcaggaatacctgaaagacacgctgcagaaatggatccacatgtaagtaaccagaaagagcttccctgcagctggcaggagccacccatgcagccttgtacggggcattacaagggtcagcgaggcatgtgcagaaagcctgtcctggatggcgtgctgcccatcagccagcctctcactctgtgacccattgccacctttgaggtcattcagcacccgctgtgggagaaccaagaaggaatttgtctttcaaaaggttatgtgggagttttaaattctctttatgtgagagttctgcaactcctgtttttacttaatgcattgtttttttaagccattccgcagggtccagacttgcgtatatcctcggggaagcaagggtaggcctggtgtgggcaacagactgcatgccccaacccagccaaaacgctctgtgttgctacaggtctatcaacactgagacacatagatatttatctactggaactcagataagagattgtcaaatgggattctgatgtttttcttaataaagatgtgaacaccatgcctctgatggagcccaaagaacatgattctgttgcaggtgtaatgaagacattaaaaatgggatcaccaacctgctcatgtacgtgaagagcatgaagggtctcgcgggaatccgggacgccatgtgggagttacttaccaatgagtccaccaatcacagctgggatgtgctatgtcggcggcttctggagaagccgctcttgttctgggaagatatgatgcagcaactgttccttgaccgattacaggtgagctggacagtcacatggtctacctgttttatggccaatcctagtggtattttgactgtcttgggagatttctgtcgcttcccaagtatattcttttcctgcttagtaacagatccagagtctagagctgaaaatacaccaggcctctgtcacttgatcgggaatgggcccatgttcatcaataatggctttattctctgccaacaccatgccatctttctgaagatggtgaaccttctgaatgctaggataaattaccatttggtacttttgttttgaaatgtccttaaaggaactgtgattagaactcttctctcattctcttttagactctgacaaaagaaggctttgactccatctccagtagctccaaggagctcttggtttcagctttgcaggaacttgaaagcagcaccagcaactccccttcaaataagcacatccactttgagtacaacatgtcgctcttcctctggtctgagagtcctaatgacctgccttccgatgcggcctgggtcagcgtggcaaaccggggtcagtttgccagtagcggcctctccatgaaagcacaagccatcagcccttgtgtacagaacttctgttctgccctggattctaagctgaaggttaaactagatgacctcctggcttacctcccctctgatgactcatcactgcccaaggacgtttctcccacacaggccaagagttctgcctttgacagatacgcagatgcggggaccgtgcaggagatgctgcggactcagtccgtggcatgcatcaagcacatcgtggactgcatccgggcagagctacagagcattgaagagggtgtgcaagggcaacaggatgccctcaacagtgccaagctgcactcagttcttttcatggccagactctgccagtccctgggagagctgtgcccccatctgaagcagtgcatcctgggaaaatcagagagctcagagaaaccagcaagggagtttagggctctgagaaaacagggaaaggtgaaaactcaggaaatcattcctacacaggccaagtggcaagaggttaaagaagtactcctccagcagagcgtgatgggctaccaggtctggagcagtgcagttgtgaaagtgagtgatgtaatttcttatccctgtcttgtctcacttctgtcatattccagtcttgccaacctcaatcagttccttcagtagtaaaggcaaaacaattctgatttcatacggttaactttatctctgccagaaagttcagtaaaaacttttttggccgggcgcggtggctcatgcctgtaatcccagcactttgggaggccaagatgggcagatcgcgaggtcaggagatcgagaccatcctggctaacatggtgaaaccccgtctctactaaaaaaatacaaaaaattagccgggcatggtggtgggcgcctgtagtcccagctactcggaaggctgaggcaggagaatggtgtgaacccgggaggcagagcttgcagtgagccgagatcgcaccactgcactctagcctgggcaacagggcgagactccgtctcaaaaaaaactttttcattcatttttagcttagattcagtagacagaaaagctgcattttttccttgcatcagatgagaatgaaagactttctgcctggatttcctctctttaacctaaatatcatattcccagtagcctccacttgtaccttaagaggtggtatttgggccaggcatggcggctcatgcctgtaatcctagcactttgggaggctgagatggttggattgtgtgaacccaggaattcaagaccagcctgggcaacatgatgaaaccccctatctacaaaaagtacagaaattattcggatgtgatggtgcacgcctgtagtcccagttacttgggaagctgaggcaggagcattgcctgagcctaggaggtcgaggctgcagtgagctgtgattgtgccactgcaatcagcctgggagaagggcaagaccctgtctcaaaaaaaaagaagtggtatttgacatttatagggtagttagcaacaaaattcccatggctgatatcattgataattagccaaaagaggactgataccatcactgtacctacaacttcagcagcttgagctgttctcaggattacacagattgttttaaagaaactctacagaggatctgagtggcttgtatggatatctgccttttattaccaggttttgattcatggattcacccagtcattacttctagatgatgctggctcagttctggccacagccaccagctgggatgagctagaaattcaggaggaggcagagtctggcagcagtgtcacatccaagatccgactccctgcacaggtgagcagggaccatgggctgaaaaagggaataaactgctccgtggaaaagaagaaagattttagaaaatcattcaacatacaacttctgaggaatagctgaaagtaacatctgtaattttctactgtgggggcatagtagatgtagggctaagtaaatggcagactgttcaagaagtcagttaaccattctttccttttgtagcataggctctgtgctaattagggaaccacttacttgccgtgaaatcagcagcataaaacacaggcacctcttcgagatcagcctcagaccgtggaggcagtaacagcaaattgcacttaaccaggggccttgtgtctgctgaacagtctgcctgtaagaagcgttgctgagaggggtcaaagtcctggcacataggccttgtaagattaagtggattcactttcactgtgtgtcatttaattggtgcaagttggcaatgtgacatttctttgttcttttagccgtcctggtatgtacagtccttcctgtttagtttatgccaggaaattaatcgggttggaggccatgccttgccaaaggtgacattacaggagatgctgaaaagctgtatggttcaagtagtagctgcctatgagaaactctccgaagaaaaacagattaaggtaggtgtctgaatgtttgcccattaaaaacacaaattaaacaaaagaaaaccttagcattgtcttgggtttgagcagttcacatcaaagactcaaactgttaaggatcacccagcccaggcatcgggtcctgtaaaaatgctctatcttaggagtagcacccagcgctgtgagtttacttacactcattctaaagggtcagcagatcttcgctaagaaggcagctcagcacagatggaaacaccaagacccagaactttgggaggctgaggtgggaggatggcttcagcttgggagttcacggctgcaatgagcagctatcatctcaccactgcactccagcctgggcgacaaagcaagaccctgtctcttaaaaagacaaaacaaaaaaatcaaaaaacaatgaaaaggatcagagcttcaaaataaaagacctggcttccaacctcagtgctgccactggttcactgggggctccgggcaaatcattaacctccgtttccttagggccaaatgtgatcctgtagataaaccgctcagtggtttcctcacttgtaaaaggcagacagcccccggccccagccacagcacacctacctcaggggtgactgtggggagttagagagaacagttgcctgccacaaagtgtgacacacagaggtgcttacttacggggagttcttgtctcccaacccttcacactgctttcactgtctaggaagcgttctgcccttggtgtataatcccatttcattagtaactttttttttttttttttttttttgagacagagtctcactctgtcacccaggctggagtgcagtggcaccatctcggctcactgcaacctcaacctcccaggctcaggagattctcccacctcagcctcccgaatagttgggaccacaaggcatgcgccagcacacctaatttttgttattttttgtagagacaggttttgcgattttgcccaggctggtctcaaactcctgggttcaagcaaatcgcttgtttcggcctcccaaagtgctgggactatgggcaggagccatcacgcctggccagtaacattttttagaaggaacatggtcaggtgcgatggctgacacctgtaatcccagtactttgggaggccaaggcgggtggatcacttgaggccaggagttcgagaccagcctgaccaacatggtgaaaccccatctctactaaaaatacaaaaattagccgggtgtggtggcgtacatctgtagtcccagctactcaggagggtgaggcaggagaattgcttgaacctgggaggtggaggttgcagtgagcccagattgtgtcactgcactccagcctgggcaacaaggcgagactctatctcaaaacaaacaaacaaacaaacaaacaaaaacccaagaaggaacaaatcctgattttggaaagaattcagtaagtcttctctaatgagcctcctcaaaacacttctccttcaggcaaggagcctttttttcccctttagaacaaccatttacagcatctgaggccttttttaagggccaggtctcttccctgctgttaggtttttaattttaaggtcaagtttctaacaaaatttgttttgttgttgtgagattaaactggccatatgagcattaaaaccatctgcttctgaaatagcaagctgaaactcaaccaaaacttgaagctgtttattacgctcacataccaagtcctctctcttcatgggtggggactgggaattcatttgcagaaagaaggtgcatttccagtcacccagaaccgggcgctgcagctgctttatgatctgcgttacctcaacattgttctgacagccaagggtgacgaggtgaagagtggccggagcaagccagactccaggtgtcgtatcctctagggagctatgtcaaggcggtctcttccaaaagcaaatagtccctttgctgggaagccaccagagtcagcctgttatactgcacattcattgtgtttgttttgaacagtaagtgctcatattgccagcaagttaaataatggccgcctgctggataaatgcaatggtcaagtgaaataggtggactcttattcccctctcttctgagtcagcctagcagctgctgagtatcatttgagcccttagtgccctccttatagacagaacgggggaaagggtggacttcacttagacatcatgcttgagggtgacttaagcactatcatcagtgacaaacgtactaagccagcaactaagtagaataaaacccaactccaagatttctacagcagtaggatatcataagattgtttttgatcctaaaaaatgtggacagtaatgatcctaatccttttctcagaattgagaaagtgactgaccacctggaagccctcattgatccatttgacctggacgttttcacgccacacctcaacagcaaccttcatcgcctggtgcagcgaacttctgtgagtcaaatcaaaaacatgcttagtgcgaacgaagcgatacaggctcaaataacaaaattaacctgctcaagcacgtaatactccaggatgcagcatagggaggggaataagacacaaatagccgagtgtagttataaggactgaaagaggattagataaaatctcacacactgaggcaaccaagatttggccccttaagttgtaaataaggattattacagttttatccaggcctcagaaagaggaataaaaactccctgcctctcagattctgacctgtgggcagtgataaaaagtaatcgtgaagcataaatgcactcagaacattccccaaaatgacagttagaaatacggtagcgatgggtgactaacctttttttttttttttttgcctttcttttacctgcacaatgaaacctctgctccacctcttgtctgccaggttctgtttggattggtgactggtacagagaatcagctcgccccccggagcagtacgttcaactcccaagaaccccataacatcctgccactggcatccagtcagatcaggtaaaggctgccaagaggcttctgcggggcacttcgggaggccaaggtggacggatcacgtcaggagatcgagaccatcctggctaacatggtgaaaccctgtctctactaaaaaaaatacaaaaaattagctggcctggtggcaggtgcctatagtcccagctattcaggaggctgaggcaggagaatggcgtgaacccaggaggcggagcttgcagtgagccgagattgcgccactgcactccagcctgggcgacagaacgagactctgtctcaaaaaaaaaaaaaaaaaaaaaatgaggcttctgctgggccccagagctgcctgtttgtgctactaaattctttcctcttgttttggaggtttggacttctcccactgagcatgacaagcactcgaaaggctaaatcaaccagaaacatcgaaacaaaagctcaggttggtgccaagagcaagaggctcatccgtggatgggtccccacctcccaccgagccacccatgatcagctcccttttaaataactgattaagaactgaatgacaaaatgcactaatgctgcttttaatggcggcgcaatagagaagtacaaggttttactagcttgagctactagaaggtgtaaaagatgcccgctgacactaccaagtagcctcttaatagaaatgtagaaaatatacaggacagggtggagatgagctcttgaatttagtagggtgaaagagttaactgccaacccggcactatcattgtacttgtttggagaaaatctgttttgttctggtgatgatggttttatcttcccttttagttgggtgggaagtaacagaaaatttgtttccccaaaagtttgacattttcttgttaatacacgtttcatttcagtacgatgccaactgttaagcctgcaggaatcctcctgggtatttctgaattgtgctgtgtgcatgtgtgtttgaaagctcaaacagcttgtcttcttacagcatcgagttgtttgctttattgttagacacaatattagcagtgtatcctttccgtattccctaccatcgaacccattaagatctaaaatccttgtcaagtatctggctttaaaagttgggagatggtagtttaaaaaaaaaaaaagctcttgcaaaaaccatccagtccctaagcatgggctatgttgcagcctcttccagaacagtttccactgcagtgatctttcagttctgcccacattaggttagcaggctgtggagagaagtgcctgtgtctacccttttcccaagacagtcctcatttccaaattctagttttgtcacaaaggctcatgctgttccgtgtcctcttcaaatctggaccgacagcaaagtcctctgactagagccatcgtgcttctcagctccgcttgtgtgtgccgtgtggactccgagtggcgtcgcgcggagggcgagtgggcaggagggctcaggccaactctaaggcacttttctctacatccaatggcaggttgtccccccggcacgctccacagctggtgacccgacagttcctggctccttgttcagacagcttgtcagtgaagaagacaacacgtctgcaccttcattattcaaacttggctggctctctagtatgactaagtaacatggcaacacatctgtctctccctaaataaatactaccacattatttcttctaaaggtgcctctgctcatctgattctcagccacaccaatctttccagtttcactgatggaatgtggccccctagttactgttgggggttactttaagcatcaagttaatccttgtcccaaaatttcacaatacttgttgctttagacatcagttcaggtagcttacattttatcagcgttcaacaacaccttaattgttgacactacaaggtggaattgtcaatgagatcatgtaagctgctgactgaccaagtttgtaggacaaaaagtcattacatattactttacttgcagaactgtgccatgtttcctactaaagtctgaggtgcagactctggtggaatagtgacacagaagttatctgggtatacaagaatctaaaagacattctctctggaaatacaaatatataacaaagagtagagactattattagggagtgtgcttcactgacagtctgaattggatctgattgttctcctgttacacaggagagagtactttcaatagaacatctacatactgagaggtagtatggcagttaatttcagtgcaagactgaatcaagcttcctatattttggaaaaaaacttatgttttttcatggaaactagatactctttactagtttattgaataaaaaaaattgaagatcccgcatttttaaaaggccctttacataaagtagagtttctagttgacagatttggaaatcagtctgaatgggacatactatggattcaacacacagaatgagttttcctcaaaccactaccttgacatagatttgataccctccctcaaaagaatcctataaaaaattgcttcaaagcccctttgaaattgcaatagtgcagcaaaaccacaagtaaacaactgcctgttaacctgttatttcaaatatagactgaaaagccaacaggcatttttcgtgtgcaatttttcttttaaaacaagttgtaagttgaaatatcaaatctgcacagcgctgtcccttcacagaaggcaagaaactgccggcacatcatgtcagaggccgccctcggtgctgtaggctgtggaagtgggcctccctcagggtctggttgatgtggaagtagaggccttggcacagcgcggactgctcgggcacgggctgaggcgtgttagggctggatccggccatggtctggctcaagctgccttccggcccgctggccctgtccgggctattgatgctgctgctgctgctgctgctgctcccaccactgtcactgcctgaagactggaaggaagaagaaagaaacagggtcacaataaggctgttttgtttaagagctttactgtggtttcatgtacagcgctctattaagagtacctttccagttcagcttgaggatgaagacatatactgggctttggaattgataaagtacgctctcctaaaacgtttcatcctctcctcacagccaccctgtcaggctgagcagggtttattgtccttaatacacagctctaggaggatgggtccagtccaggttcaagcacgggctgcctaactccaaatcctttcaactatatcctaattcttttgcacatattctatacctgcttttcccattcatttcaataatttccaaccaaagaaggcagttctcagcctccaagggaatgtatgagtcattgggacagagtataaaaaaggtgacaaataagatggcttctgggtataagcgaagataaaaactaaaagcctatgccaattttgtgatcatcatagacacaaaatggtattctgtaactgcaggacacagaccctgaaaggactttaatagacttctggtcaagttatcttatgttggcattattgcagttcatatgtacatgtgtgtacatgagcgtgcctaactttttctttaatgtaactaacatgacttggtgttttagtcatcttggagaggctactcggagatccctgataagagtcactttcattctgcagttcatgttttaaaaaaaaaaaaaaaaaagtcactttcagaaattcccgccttccaccactaggactctcaaaggggagggtgacacgaaggacccatttcagaattatggtattttacaattttttttggagacaaggtctcactctgttacgcaggctcgagtgcagtggatcaagctcactgcagcctcaatctcctgggctcaagcaattgttccacctcagcttcctaagcagctggtactacaagcgtacgccaccatgcctcgttattttttttttttttttttttttagtagagacaagatctcgctatgttgctcaggctggtctccaactcctgagctcaagcaatcctcctgccttggcctctgaaagtgccaggcaggaaagattacaggcatgagccaccatgcccagccttattttacaattttactattgcatttctaataaatgacaaccctgataactgaattggcagtacctttctgtgtttacagtgcaatacaatattgtattcagcacatgagaaagaattctagtaattaatatctagcatataattgttttttaaaacttagccgtttaatacatccacatttatgttcccttaggcaaagacattggttctgaaatgtctgcttacaactaggtaaagtctacacataagaaaaaaaagactggaggccaggtgcagtgcctcacacttgtaatcccagcactttggttggctgaggcaggtggactgcttgagtgcaggagttcgagacctggccaacatggcaaaaccccagcctggccaacatggcaaaacccccatctccattaaaaatacaaaaaaattggccgggtgcagtggctcatgcctcaggagttttgagaccagcctagccaacatagtgaaaccccgtatcaattaaaaatacaaaaattagccgggcatggtggcaggcggctgtaatcccagctactagggaggccgaggcaggagatcgcttgaacctggggggtggaggttgcagtgagccgagatcgcgccattgcacccagcctgggcaacaagagcaagacttcatctcaaaaaaaaaaaaggccaggcgcggtggctcatgcctgtaatcccagcactttgggagcccgaggcaggtggatcacgaggtcaagaggtcgagaccatcctggccaacaaggtgaaaccccatctccactaaaaacacaaaaattagctgggcatggtggtgtgtgcctgtggtcccagctactagggaggctgaggcaagagaatcgcttgaacccgggaggtgaaggttgcagtgagccgagatcacgccactgccctccagcctagtgacagagtaagactccatctcaaaaacaaaacaaaacaaaaaaattatctgggcgtggtggctcgcgcctatagtcccagctactcaggaagctgaggtgggggaatcacttgaacctcggaggtcgaggtggcagtgagccaagattgcaccaccgcactccagcctacgcaatcggaatgagactgtctcaaaaaaaataaagactggaaagaaagaacgaaatcacagtagttatattaggatggaaagattatagctgcttgactttttctacacttcaacttttttgcaatgtggttattatgtatttttattataaaaatgtataaattaaacaaaatgctgtttacagatatatattttaaagtgattcttaaaatcctagttctatcccttttttgaccaaaaattacatccaataatatgcatatagataacttatctgaaacaatgaaaacaagcaatgttcacaaagctgccatcattaacaagactcaaaccaagacttgtgatggtgccgaggccattggagctatggtcacataccccaatacctacaggtagcaggggacaacccctctttctagaataaaaaaataaaaaaataaaaacctcatgaaaggatgataatgggccgggctgatgaagtcagatagcaggatttgcagccagctgcaactgtatttacttagaggcttaagaagtcaaagtcaaaaacaaaaattgtattctacaaaggcgtctcctaacctagtataacaatgtagaatggccacttgcaccttgcgaatcatgaatatttaacaaacaggtcactacactcaattagaaacccaccgcgcagaacgctttgtttcctcttagtctgttttctttactgtttctcattacaggtactgtctgaaaatcaaggcaagaactacaatcagtttctagtaagtcaagttttcatctcaaattatatctatttcgtactataatagcacaagggtgatgctactctaagaaaaggcaaaagttctttaaacagattagggaagatttctgtacataatttttttttattttttattttttttagggttaggtagatttgcaatttccagttcatttaaaaaatcttggctgggcgcggtggttcacgcctgtaatgccagcattttgggaggctgagatgggcagatcatgaggtcaagagatcgagaccttcctggccaacatggtgaaaccccgtctctactaaaaatacaaaaattagctgggcgtggtggtgtgtgcctgtagtcccagctgcttgggaggctgaggcaggagaatcacttgaacccaggaggcggaggttgcagtgagctgagatcacgccactgcactccagcctggcaacaaagcaagactgtctcaaaagaaaaaaaaaaaagtgtttactgggccttgtttataatggctaaaaattggaaacaacctaaatgtctaatagagaattggtttaattatattacatccattaatatacatatatgatgaaattctattcagccattagcaatgatcatagagacatacatatactaacatcgaagtctttggcatcattttttacatcatttcagttcatactaagcagtatatatagtatatcagttgattcttaaaatgtttttctcaagtgtattcatacatatatttatatacaccaaaaacaatctggaaggatatatatgacaaaatatttacgatttggatcttctattttattttaaaatttattttctcaagtgtctatcaaaaaacatttcttttgaggaagaaactgataatgagtaagtgaactaaagaatgctaccatgggccaggcatggtggctcacacctgtaatcccagcactttgggaggctgaggcaggcagatcacttgaggccaggagttcgagaccagcctggccaacatggcgaaaccgcgtctctactaaaaatacaaaaagtagccgggcgtggtggcgcatccctgtagtcccagcttctcaggaggctgagacagcagaatcgcttgaacctgggaggcagaggttgtactgagccgagatggcaccactgcactccagcctgggtgacaaagtgagactctgtttcaaaagaaaaaaaaagaatgctactaggaaaccaagtaaggtcttcaattacatttaacttcaaaatggagactgaaaagtattgatactgccaatatgattttgagaagattgtttcaccttaactacctcagaacttctaaagctgcttcagttgtattaacttgcattgagcagaccaatgatagtgttaaactactgaggctttggtttctattttctgacaattcagaccagttttctcactactgtggaggcttagggagtgtcacacaatctatagatggaccaggatttttcaaattgagagtgaaaccagcatcaaattggtgggttacaaccagcattaaaaaaaaaaaaaaaggacaacagagtgcaacataaggatattgttctgtgaagctttctttcaattattcacaaatatatttggtatgtactgggttacaaaataaagcatttctatggaacagggtcaaaaaattttttgaagttactgtagttgatcttaacactgtcagccaccaaagtcatctgctttatgggataaaggaaagaccattcttcacttttaacccaaaaggcataaaactaaatttgaagtctgtattagtgccttaagatatatacagaagtaaaacatttttgtctcctaaagtaaacatcttgaaacaggaaaaaatcctatttccctcacttagttgaagctttttaatatcagattgcttgagggcaaaagccaatacttgatgatgcacggctttggaaatggaaactgctatcttagtagagaagtgtttaccttgtcacatttgttctcgaaaagacaccaaattcttttaccaaaagagaaacaagggtccaaagactttgggactgagaaggaccatcaaataggaatcccactcttatgatcctgattccttacagactcatcaaacagtttaaccaaatcaacggttacaaagctcattttcttttctctgaattgtccatttaggcttagtgctgacatgacatctgaccaggctattttcatgacacaatccaaagagaataaagctgcgtgtgatctgtgaaataaaaaccccttgcaggtctgtgaacacaagcaagataaatttatgaaggctctggccaagaatctctctcaacaatatacaaagagtcctgtcttgaagatctgtgtgaaaaaggattctaggttagtttcggtaataataaaacctaccactgtatccttataaccgcagacatctgggtaagacccagaagagaactgccatgatacaatctattttggaattacctatgggctttttatttcattttttgaaacaaggtcttgctctgtcactcaggctggagcagtggcatgattacaactcactgaagccttgacctcccatgctcaaacgatcctcctgcctcagcctcttgagcagctgggactacaggcgcatgccaccatgcccagctattttttgtagagacgaggtctcactatgttgcccaggctggtcttgaactcctgggctcaagatatcctcctgcctcagccccacaaagtgctaggattacaagtgtaagccactgcacctggccactaggggctttttaaagtgtaaatgccagggccccacctcagcaccatgctggcaaaaggaaggtgcagcttgttctcacatccaaccactgggcaaagaaatgtttgtgtgcttactatgtacaaggcgttccactagggctgctgaagcattcagtaaatatttactgagctgaatcaagaaaatggtggcaccatacccattggtaacaacagttcacagctactgtggtgatgggaatccagcaatggatgctgactgagtactaggagaggatccttaacatgaatggtgtctcagctgggcccaggaggataaggaagaattttcacaggcagggtatgaccaatgggaacaagagcaaactcagaaaagcaaggtgtggtgtgggtgggcccttgacaggagtgagtgagagggaaactgcacaagaggtgatggctagattatcaagagccatgagggctgcaggaacaggtgggtcctgagcatggaagactggctcaggtctatacttacgagtggggatcctaggaatctgtgggagatgaatgaggttaaggatctgaaagcagagccctactgggagctttcctaatacaacaagcaggaaggcaggcccaggaggactgtggaaatgacaaggaaggagaacacgcaccacccccgaggaggacagaaagaactccggaaggagaggaagaagacatagggtactcgagcatcaggacagtgctgggcagacagcaggtgtttgggaactgtttgctgaatggaaagaccattggtgagcctggcaaaaagtttgaatagagtcaaggaggaagccaggatccagagagtaagggagggaaggccgatgagaaagtcccagcagtggctgcaggcaactgaaggtgactggcgggagggagagggagaaggcacacaggaagctgaggggaaaacaaggcagagaggaggtgagtggggaaaagagcccactagcaggccagggaaagaaacagtgggtaaaaggaatctgaagagccgaaaagaagggagaaatactagaaaaagctttcaggagtcttgagagaatatagagcaaaaaggcagaaggacacactactctctttggcagaagggctagatataactaaattgtgaagcagaggacggggaagttgaagttcattttcttagtccaaagggctcaaatgatacatcaaagggcacagaagctctggtctctcagccaggcctgcctttcattttatttttccagtgtgcaaagtcagtttaagagacaactcacttatacccatggcagaaactaaacaactccaaacaccatttctactaataaccttaagaaagcacccccacctcagacagaaatattaatcactaagccattccacttcataaaaagagagctatgtgtatattatctagaaccaaatgctttctcttcttaatttgaaaagcagggctgggcccagtggctcatgcctgtaatctcaacactttgggaggccaaggcgggtggatcagttgaggccaggagttcgagaccagcctggccaacatggtgaaacctcatctctactaaaaatacaaaaaaccaaaacaaaacaaaacaaaaattagccagccataatggcaagcacctgtaatcacagctatttgggaggctgaggcaggagaatcgcttgaacccaggagatagatgttgcagtgagctgagaatgtgccactgcactctagcctgggggacagagtgagactgtatctcaattaaaaaaaaaaaaaaggccaggtgtggtggttcatgcctgtaatcccaggactttggaggcccagacaggtggatcacgaggtcaagagatcgagaccatcctggccaacatggtgaaaccctgtctctactaacaatacaaaaattagctgggcgtggtggcgtgcacctgcagtcccagctactcgggaggctaaggcaggagaatcacttgaatctgggaggcggaggttgcagtgagctgagatcgtgccattgcactccagcctggcgacagagtgagactctgcctcaaaaataaaaaataaaaaataaaggccaggcgcagtggctcatgtctgtaatcctagcactttgggaggccgaggcaggtggattgcctgaggcaggtggattgcctgagctcaggagtttgagaccagcctgggcaacatggtgaaaacctgtctctactaaaatacaaaaagttagccgggcgtggaggcgtgcgcctggagtcccagctatttgagaggctgaggcaggagaattgcttgaacccaggaggcagaggttgcagtgagctgagatcacgccactgcactccagcctgggcgacagagcgagactctacctccaaaaagaaaataaaagatcaatgtagtattttattttctgtcaagccccagcttccccttacctccatcccctctttcaatggtgctttcaattaatgtgaaccttaaaagaggaatcttacccatagtatatactccatctctggagtcatgatgaagctcattttcattctaaggctgccacagaatctggattaaatgcaagagatgatcccagccaagtctatcagagcatctaatgtaaaattttgtgcttccaaagtgtccaataatttcagaaaacttcagatctaccaatattggtgacacaagattccaaatgaactcagtgggttaattaaaaccactttataaataagcaaggaaagaaaatgcaggtgataacttttctgtctccatgaataaataacatcctttctatacctttgttacccttataaggtgaaactggaccacacaatgtgtttaaagttccttctgaatggaaatactgtattattagtatcactttcactttgtttccatttcaacaggccaaaaaataaggcccagcagtagaaaaagatgtgtatgtgtatatcttcagtacttaataacagattttaacattctgtttcaataagaaactgctgccgggcgcggtggctcacgcctgtaatccgagcactttgggaggctgaggtgggcagatcacctgggctcgggagttcgagaccaccctgaccaacatggagaaaccccgtctctactaaaaatacaaaaaatggccaggcgcagtggctcacgcctgtaatcccaccactttgggaggccgaggcgggcggatcacgaggtcaggagatagagaccatcctggctaacacggtgaaaccccgtctctactaaaaatacaaaaaaattagccaggcgtggtggcgtgcgcctgtagtcccagctacttgggaggctgaggcaggagaatggcatgaacctgggaggcggagcttgcagtgagccgaggtcatgccactgcactatggcctggatggcagagcgagactccgtctcaaaaaaaaaaaatacaaaaaattagccaggtgtggttgtgcattgcctgtaatcccagctactcggaaggctgaggcaggcgaatcgcttgaacccgggaggcagaggttgcagtgagccaagattgtgccatagcactccagcctgggcaacaagagaaaaactccgtctcaaaaaaaaaaaaaaaaaaaaaacgacgaaactgcttggggtagcttagtatgctgtgaattgaggtatttacaaacatatcaaggacttaaactgtaagcaaagtaaatgtattctataaattagactaacagcactgttcctcccttttgaatggatcttttaagaaattaatctcggctgggcgcggtggctcatgcctgtaatcccagtcctctggaggccgaggtgggtggatcacgaggtcaggagattgagaccatcctggcgaacactgtggaaccccgtctctactaaaaatacaaaaaaattagccgggtgtggtggcaggcgcctgtagttccagctactcgggaggctgaggcaggagaatggtgtgaacctggggggcagagcttgcagtgagcggagatcacaccactgcactccagcctgggcaacagagcgagactctgtctccaaaaaaaaagaaaaaagaaaaaaaaatgaaattaatctcaggccaggcatggtggctcatgcctataatcctagcactttggaaggccgaggcaggtggatcacgtgagtccaggagttcgagatcagcctgggcaacatggtgaaaacctgtctctacaaaaagaatataaaaataagctgggcatggcagtgcgcgcctgtagtcccagttactcaggaggctgaggtgggaggatcacctgagcctggggaggtcaaggctgcagtaagccatgatcataccaccacactctagcctgggagacagagtgagaccctgtctccaaaaaaagaaaaaaaaaaaaaacaaaacttaatttcagagttaatttgctacagggttctaaacacacaatcctaacagtttcactgaaaagagtcggccaaatcagtctgtctcttagaatgtattaatactacaactctaagacggattaaagatgagaatgggcaagaatgaagagcttaaaataacatttaaaaaaattattctaaatactcctattgtcatatgaattcacattattttttaaaaaatcacccaacactcagctaattcttatcagttaaaacaaatgaatttatagactcctaactttatgataaatggatcccctggttctattcttttttaatttctcacacttccgcattcccactaagaattcccttaggattttaatattaacatcaaaaattttgccttctagtagagacaaaggggctgaagctgtcctaggtaagccacttcttttttttgttttttattttgagatggagactcgctctgtcacccaggctggagtgcggtggtgcgatctcatctcactgcaacctccgcctcctaggttcatgtgattctcctgcctaggcctcctgagtaactgggactccaggcatgcaccaccacgcccagccaatttttgtattgttagtagagacggggtttcaccatgttgaccaaactggtgtcaaactcctgacctcaggtgatccacctgcctctgtctcccaaagtgctgggattatagacatggcccggcagccacttctgttttatctccacattttttcactctctatctgatattacttcacactggtctaaaaaatcaaaatggtcttgttaagctaagttaaaggtattaaaaaaaattgaggtctttgtacttttaaaaggtattgctttttttttaatttagattttttttttttttttttttttgagatggagtctcgctctgtcgcccagtctggagtgcagtggtgcaatctcagctcactgcaacctccgcctcccgggtccaagcagttctcctgcctcagcctcctgagtagctgggattacaggtacgcgccaccacgcccggttaatttttgtatttttagtagagacggggtttcaccatgttggtcaggctggtctcgaactcctgacctcgtgatctgcccgccttggcctcccaaagtgctgggattgcaggcatgagccaccgggccccagccaaatttagattttaatttcttccctcctaaggatgagaagatactgcttttatttactcaagtagaagcactttttacaaggcatatacctaggtaacagaagctagatttacacagaaacttctagtgtaatttgtagataaagatattaaaactgaaagtaaagaacattactccttctacatgtaaataatagaattcaacctaaaaagactagaccctaaaaaaaaaatttaagttaaatctaagtagtttttacccatccaaatagttgcccaagatcaggatttgatagaaaaaaattgataaaatcatttcacttcttgctcagtgaagagaaaactgagcctgagatagatgttaactaatgtgattcatctagaatggctttacacgaaacaaaaaattaggctgggcatggtggctcacacctgtaatcctaatactttggaaggccaaggtggaaggattgcttgagcccaggagttcaagatcagcctggacaacatgaggagacccccatctccacaaaaaaaattttaaaactagccaggtgggccgggcgcggtggctcacgcctgtaatcccagcactttgggaggccgaggcgggcggatcatgagatcaagagatcgagaccattctggccaacatggtgaaaccccgtctctactaaaagtacaaaaattagctgggcgtggtggcggtcccctgtagtcccagctactcgggaggctgaggcaggagaattgcttgaaccctccccagaggcggaggctgcagtgagctgagatgcgccactgcattccagcctggggaaagagcgagactctgtctcaaaaaaaaaaaaaaaaaaaaaactagccaggtgtagtggcgcacacctgtagtttgggaggctgagcagggaggagtgcttaagcccatgagttcacagctgcagtaagccatgacagcaccacggcactcctgcctaggcaactgagcaagaccctgtctcaaaaaaaaaaaaaaaattaaattagtaaatacttcaacttaaaaaaatagtattctaaggctcataagtcattaagtccaagttactggagttaaaattcaaagtcttcaattcaagcactaatcagagatttggaaaaaaaaaacacaagaccacatttttgttttttttcttgctagaaatctaaaattgctttatagctaagatcatatcatgccatgtacttggaaaaaacagcttctagataaaaagagaaggaaaattgttcttctctgttcctgactcaaaacaaaactagggctgggcgcggtggctcacgcctataatcccagcactttggaaggccaaggcggatggatcacctaaggtcaggagtttgagaccagcctggccaacatcgtgaaacccatttctactaaaaatacaaaaatttgctgggcgagctggcgggtgcctgtaatcccagctactcaggaggctgaggcaggagaatcacttgaacctgggaggtggaggttgcagtgagctgagatcatgccactgcactccagcctaggtgacagagcgaaactctgtctcaaaaaaaaaaaaaaagaaaaaaaaagagaagactaggctctagctgctcctggatatatttagcaaagtctcgcagaacctctgttctatcttctgggagagcacacaccatggtcaggagcgtgcagcccaacaaccacaccctggggctccgttcctcctctgcctcttactagctgtgttctttggacaagtgactatttttctgtgtgccaagttttccatctgagaagtggagataataatacctactaaaacaggctgggcacggtagctcacgcctggaatcccagcactttgggaggccaaggcaggtagatcacctgaggtcaggaattcaagaccagcctgaccaacatggagaaaccttgcctttactaaaaatacaaaattagcagggtgtggtggcacatgcctgtaatcccagctactcgggaggctgaggcaggataatcgcttgaatccaggaggcagaggttatggcaagccgagattgcgccattgcactccagtctgggcaacaagagtgaaactccctctcaaaaaacaataaacaataaaaaaataaaatgggggaaagaagccatttatgcacacattaatttatgcacacatgaagtttctctctatataactaatccggcaaatcagttcacattatttagctttatagtatctaggaaagaagaggcagatactattatctccactgtacagatagttgtgatttacttgtggcacaatttaatggtttaacataaataaaacacctcacatatttcctagtactcgccattattattgtacttaagcaaaaaggttaacttttagaaatgaattgtaagtaacttttaaatctctcttagaattaaaaaaaaaattcctcatgaagttcaagttataagaaaaagaattcttaaacagccaggttaacaaaaaaaagaaaataagaaaaagaatttggccaggcccagtggaggagggtcagaggccaggagttcaagaccagcctgggcaacacagcaagaccctgtctctacaaaaaattaaaaaaattagccaggtttggtggcacatccctgtagtcccagcacctcaggaggctgaagaggaaggatcatttgagcccaggaggttgaggctacagtgaaccatgatcattccactgcactcagcttgggcaacagagggagcccctgccagaaagaaaagaaagaaagggaggaaggaaaggagggagggaagaagggagggagggagaaaggaagagaggaaggaggggaagagaagaaagtggaggggaggggatgagaaggtaggggagagaaggggaggggagaacagagggaaggaaggaagggaattctagccaggcatggtggctcaagtctgtaatcccagcattttggggaggctgaggtgggaggatcgcttgagcccaagagttcacgaccagcctgggccatatagtgagacgtcgtctctccaaaaaaaaaaaaaaaaaaaaaaccttaaaaaattaacccagcatggtagcatgtgcctgtagttccagctacttgggaggctgatgtaggagtattgcttgagcctgggaggtagaggttgcagtgagctgagatcacaccactgcactccagtctgggtgacaaagcttattcattcagggaaaacataggaaatggtttctcttacataacttaagtttcaaggaaactgacctcatggccctacctcagaattaaaagaaaacattttcattagtaatgttattaataaaatattttgtctaaattgttaatataattaaaaatgaattgttttattttcccttttatacacaatcatcaaaaaccagccaaatgtccctaaacttgattttttgctgctacaaacataatcatttattccagtagtgaaaacttcattatttggggcttaactttccattttaaaagatattccctctgccttttgcttctctggctctctcatcattcacttgtccttgttacttgttaataccactgccaggaagcacagcgcagcacagcacagcacagcacaggacaggacaggacaggacagcacaggacaggacagcacagcacaggacaggacaggacaggacaggacaggacaggacaggacaggacagcacagcacagcacagcacaggacaggacagcacagcacagcacagcacagcacagcacaggacaggacaggacagcataggataggacaggacaggacagcacaggacggcacagcaggctattctggtcaatgttcagtaagcaaggctgaaactaatggttgtaacaccccattaggtgatctaccagtgagttcagacagaaactaccagtaatgaccttaaacgataaggaagacaatctagtccttccttcagataatgattacggagtggctcaacaactgaatttctttggacaagtaaggacaagctcagctagagaacccaggaggttgagtaacaagacgttgttttcttctgtgagaccaatgcacggattttagaaagagagtaaaggtcattttgtaccaaaaactaaataaataaataaataaaatttaaaaatctacaatatctgccttacttaagagatcagaaatgttaatttttttaaaaaaggatgacaatttctttctttttttttaaccaagagacaaaagcaagaaaaagatggcaatttctattgctgttctcaggcttcaaaactggcagatacgggaaaaaaacgttaatacagagagttagacctaccatacccttgactgaaatgaacatcatatagcaggacttacatacagacacaagtaaggaaatactgatggccaacaccatagaagtaatctttgcatactcttttaatgaatagtcttacaattcaaaagaatggaaactcaattactattacagggttttatcattagatattcatggtagcctctaatcttgttttctttcatccctgagattcccaactattacattaaacaaagctcaattacctttctgataatcattttttaaaaagaaaagaaaaaagcaaataggaaaaaaatatatatatatataatatatatatatatatattttttttttttttttttctgaaacggagtcttgctctgttgcccaggctggagtaaaacggcacgatctcagctcactgcaacctctgcctcctgggttcaagccattctcccacctcagcctcccaagtagctgggattacaggcgtgcaccaccacacccagctaattttttgtatttttagtagagatggggtttcaccatgttggccaggctggtctcgaactcctgacctcgtgatctgcccaccttggcctaccaaagggctgggattatagggatgagccactgcgctcggccaggaaaatatttgaagaggaaaaacagctatagaaactcaggtctccacacagaaggattctactctgcacttgttcactgtctctgaatgactgttacctacatgaaagttcctgatttttcccccttgggggagttactttgaattgctggcaaagacagactggatataggtcaaatcctattatcaggaactaattaaagtacaaattatttgggtgtgggagaattctactgtgagttatgaggctagggctctttgttgttgaggcttttctcttagtgtgacaactgttaagggtcaaaatctctaggtgcataacttaatagcagcattactttatattggtttcctttccccagcacagagcagccttccaattgcacagaaaatgtatcctcagtctgcgtactgaagcactctttcatgaaatcaaaaattgtaaaaaagttccagaacacccaactccccttccctctcaccacaggagctcttttcacaacaagataatgaaaagtaaaaacactgagaaatgggattctgcatacacataccttacatattttacatgcttaaagtttctcttaaaaggcatttgaattgaagcaacaaaatatgtttatcttaaggacaattcatggtttataaactaccagaaaagaagttcgctgctgaaatacaaaacagtgagttcaaacataggctttcaaaaagccacgaaatttctaacaaatacaaatgagtgtgtacatatatgactatgtgcacatatgtactgttttgctggggacagggtacacagcttcctcaaagggaccctgatttggaaacagaaaggttaaaccagtataatcaactaaggtcattttaaattactgtttaagtaaatttaattacacagcagatactaggttatttaactcaagcagtgaaaacaacagactatgtgaccacacttcctacctctgtgtcccaggaatcctgaaagacagggtttctgctacttcttttggtctgggggggaagatggttgtcttcttcgttgccattccttctccttttcctgaaattaaatcacaaggagaaaaaaaaaaaaacccaaacaaccgatgttttggacacttgaattgcaaaccataacaacatataaatttgccctctggcctgagaaaacataattcagcatatgatatcccaataggttatcagttggaagtacagcatcactggacactaagagcaaaaatacaagacagcagcagcgaggtcaagcttaagttagtaaaactcatttctaaaaagaagcttaacaattttaaatgtctgttgggactgaaacaagaacaggaagaggttaatgactaagctttcaacctctaacctaattaaggttttcttctttttacactccctgaaattaggattccgagttacctaattgtactcccttccatatgacaacatttgatataagagtggctgcctttgcctatttgccctgaaaacccttataaaagtacctcttggtcacattcacctgcttattctggcaacactagccggtattatgatataacaattacttcactagattgttactatgagatgatagcataagctgcttaaaatttccaggtttaaagaaaaatcacacatctttcttaggcaagtgttctcggacatgcaagaaagaccaaatttgcatgtactctatttaagaattatgtgctgtcaaaacgatttctgaacctgttagaaaacagaaataaattaaaggaggtataattttcagtcaaattgcccggaactgtactgtccaatacggtagccactagccacatatggttatttacatttaaattaactaaaattaaccatccagttcctaggtcacagctgccctgtttctagtgctcagtggccacgtgtagctagtggctactgcactgaccagcacagataaaggacatttccgtcactgcagaacgttctccggagcagcacaggctagaggtctgtatgtacatggcagcagcacctattacaaaacccttgaagtttcagctttctatagttaagagacaaaaggctagtgtggacacacagctcttggaaagcatgtacatttggaggatatagtgtcttctaaataattatacactttctatgagagtagggtggcttacagtggcaggcctttaatcctaaaggttttgagttgaggtttgaatattagagaaaataaatgatcaccctaagctcacttctctgtactctgcaacattctgaataggtctaactttaataatgagtatggatcccagcttaagtttggaataataaagagtgtgtggttctgataaagcttcaaccatcctgcactgggctatgtaatttacttcattctaagacatttctgctccccacctttctcttaggagatcagatcttagctgcacattactttgaagtagttggaggttaaaaaaaaatagatgaatatcaggttttaataatcattaaatgggtgtgcttttatcataaatttgaaccaagaaactgctaatttcatcctaatatgatcagggaatttgagtgggagtgttctgcagaggcaaagcaatgtctgctgggaggccagtcgacacccaaagagaaagtcattgagtaagtagcagctgctggtcctcacacacccattttatcagcgtgccaacagctgactgggctttgggctgctgagtcactctaaccaaacttaggagcctgatcaaaatttgctatctcctcatttataatgggggatagatctttccagggacaagactatgaatgtcaaggaggttgcatggcagagggactgtaagaacaaaaaaagatgagatgattttgtggatttcaactaatctctgggagagtcacatgaaatatccctgcctcataaattacttgatctctcaaggcaccagaataatctctttggcctgttggtagccttctcctctggatggtaccagattaagaaagagtcctacctgctcttcatttgcctttttctaggctcttagcagatctcatccttgaaacattcttctttcaacaatggtgttaacaactggcaagattacagcttcatgctcatccctatcagttcaatcaatcagattacaatttttggcattaatgccacagaccaggttatgattttagcaggcacccctataactgattatattcttccctaaccatctaggtgcagattaccagttagcatctgttacttctacagatggttgattccatcacgttgcattatttcatttctctccaaccttcctgtcatctcctagagactcggcatagaaataatcttaagagtatgggctgggcacggtgactcacacctgtaatcccagcactttgggaggctgaggcaggcagatcacttgaggtcaggagttcgaaaccagcctggcccacatggtgaaaccctgtctctactaaaaatacaaaagagttagcagggcgtggtggcgtgtgcctgtaatcccagctacttgggaggctgaggcaggggaactgcttgaacccaggaggtagaggttgcagtgtgccgagatcgcaccactgcactccagcctggccgacacagtgagactccatctcaaaaaaaaaaaaaaaaaaaaaaaaaaagagtatggaaactagtggttttcaaactttattttaaaaagtaacagaactctttctttcttactgtaaaaaaattctctctatataagagataaaggatctgttaaagtagggactcccagtctggtgaggtggctcacatctgtaatcccagcactttgggatgccgaggcgggtggatcccttgagcccaggagttcaagaccagcctgggcaatatagtgaaaccccacctctaccaaaaatacacagattagctgggtgtggtagctcacacctgtgctccagctactcaggaggctgacgtgggaggatcacctgagcctgggaggttgaggctgcagtgaggcatgatggggccactgcactccagcctggtcgacagagtgagactctgtcaatcaatcagtcaatcaatcaaccaatcaatcaatcaataagcagggactccctcactacacactcacctctctgcggctatccaatctactgtgggagagcctgaaaacccttttttttttttagatggaagtttcgctcttgttgctcaggcttgagtgcagtgatctccgctcactgcaacctccgccttccaggttcaagcgattctcctgccttagcctcccaagtagctgggatgaaggtgcccaccaccaggcccaactaatttttttgtatttttagtagagacagagtttcaccatgttggccagagtgatctccaactcctgacctcaggtgatccgcccgccttgacttcccaaagtgctgggattacaggcgtgagccaccgcacccagccgaaaaaccaccgtcttagaccatcctagagctggcagagctggcccatcatactccattaaacactggcaggaaaagcctgtccaaatcaaataacttctttaaaacatgttgagattatttgtgtacaagataaaaggaatctactgccagtataaatgcattcagattagttatgtacagtagaatttttatttgtaggaaatatttagattttttttcagatatgtgagacaccccaagagaatatcgtaagtataaactgggtttgggaaagaataatatggcagtcgggtcagattcactgtatctaaagatcttgctcctaattccgatggcatgtctgtaattgggcccccaatttcaaatttagtccactcttcttttctatacaaggagaggctttatgctccacctgctacatgacccaaatcaataatccaatgcagcagcttggggaaccctaggttttcactatgggaccaaataaactcagaatacttttgagaacttcaatcacatgaaataattatttcagagaaggatccttgtggaaagaccgtaacaggaagagcattctgaggtaacctttcccaactttctcctccacacattcttgcagaggaaattaagagagagaaaaaaattaagaaatcccaacttagtccggactctagtagtacatgtcaagcacagaacccctaatttaagacccgcgtcccgaggccaggctccctcgggaaggtagcgagtgcatcgcgataaaatctttcctcccgccttcggagtcaaacggccccgcaatccaaacagtttagaatccagcttgttcttaatgccacagtcaagagaagatccataacccgccttggtcatctgcccttctgtgttcacaaccgttcagggcacaagttcttcggtctaaccgaatctttccctgctgcggggttaagcccaacctttctttctgaccttggggagccggcagctccccgcccggtgccctcacaaaagcctttgggggctccctctccaagatgagacgtttatcccatccccccaccctcctaaatttaggacaggaaagctttagggccaccgtctctcttccgggaccgatcacacttcgttccaaataggaaaagacaggggggaaaaaagatggaggggcgggagacctggaccccggagagtcaccttccagctacccacaggaaccaagcatccgatcactcgcgcatccctctcccctcctcccccggcccgcagtgcaccccacagggagccccgccgggtccactcttgctccgacccccatttcgcgcgccccctcggctctatctcccagatcctcaggcgacgaatggaaagggggtcccttccctctcacctgggacggaggcgctcgctcatggcagctggcggatggaagctacgcggcgccgctccgcgaagagagggaacagagggggttgtgtttcggcggccgccacgcccaccccctcgggccttggctctcgcagccgctcgggtggacgcagccggtggcgagtacccctcagtcggacccgtaccaccactacttccggcgtctgctccgcgcccccccatgtcgctgccgccgtggtaccgccctctcgcggctgcgcagtggcaccatcccaaccgcaccgactggtaaccccgcccacgggaagaggcgggctcggagcgggaggagcgactaggagcttctgggagaaaggacctcccctggggtggcagaagcgctcgcctgttcacagccaacggagggtacggtataaaagtcaagccaggtttcaaataaattcaattatgtcataataatatcatacaagtatttgagttgaatccgtgtaacatattttaaaacaggcggacctatccggcagtggtgcagacggcctgacgaggttccttggccgggggttgggcaggggcctggggggcttccctggggggcttgtcgccggggccgcctgggctttcaggtcttccgaggtgaggacggtgctctgtggggagcttgcaagggcgggtttgttttccgcggcccacgttctaagtctgggggagactctcctgagcggagagggtagggaatcgggtgccggggccggcggagggtcttcctggaaccgcaggaggaaatcctcggtggggctgcgggaacggctgtccctgacccaggagctgccgggccgaccccatccactccgcagaatcagaacagctggcagaatcagaacagctttcagggaaaggaagggtgcggggaggtgggcaggctggtaacgcagcgggaggagggaaaggcggctggagagcgccggaggtgagggtgaggattagtggaactattgaggtcctccttgagcccggaggctggggaggtcttaactctctgctttccggaacctgtgtttctatttggttcagtatcgtgccgcgtttactcactgtgcatgctgccaagtcacctgtctgatcgtgtcctacacaggctgacattcacgtttcattctgccacactcgggaacggtgatcggggaagcatggggatccgggagaagcacccacaaaactagcatcctcctggaggagctcgggtaagaaaacagacacccacgtatagacgttatcgtgggaatgtaccgggatctttcaagtagggttgagtgtgaggtggagtggaggcagaaacgtctagcaggtgtcaagcccttcctaacgttgttagccgaaggtccatggactggcttcatttgtgtgtattattgtaaacaaacagtctgtggctttcatcctgttagtgtgtacctccaaagaaagaaagaatgatggctcacgcctgtaatcccagcaggctgggcgcggtggctcacgcctgtagtcccagcactttgggaggccgaggcgggtggatcacctgaggtcaggagttcaagaccagcctggccaacatggtgaaaccccgtctctactaaaaatactaaaattagctgggcgtggtggcgcacgcccttaatcccagtaatcccagccacgcgggaggctgaggcaggagaaccgtttgaacctgggaggctgaggttgctgtgagccgagatcgcgccactgcactccagcctgagtgatagagcaagactccatctcaaaaaaaaaaagaccaaacaacaacaaagtaaaaatgattactgtaatctgttggcagaaaacagttttgttttgaaggacttcgtacaggataaggtgggttggttgctttattgaatggattggtgaagattgtgtctattttgtaagtggtttcagtcaccctttttaatctctttggtagtcagaagatattatcagttgtagtactgaataatatttaaacgtttatatctaaagaattaagtgaacaaatattgtatgccaggctcagtgctaggtttttacatacagctgtgtgcaggatagatatgtttcctgccctctggaactttatagaaagaataagagatgtagaaaggaaataactttcaactaaacattggaattaaacattttcttttctggactctaaagaataacaggtacaaatatacatggtataaatgttttttttttaattttttacatcgtatatgtttaacaaagatgtcaaactaatttgccagtaatctgttgtactagaaactataagtaggccaggcgtggtgtctcacgcctgtaatcccagcacactggaaggccgaaggcgggcagatcacgaagtcaggagattgagaccatcctggccaacatggtgaaaccccgtctctactaaaaatacaaaaattagcctggcgtggtggcgcatgcctgtagtcccagctcctcgggatgctgaggcaggacaatagcttgaacctgggaaatggaggtttcagtgagccgacactgcactccggcctggtgacagagtgagactctgtctcaaaaaaaaaaaaaaaaaagtataagtgaaaaacaggactgtgtccttggccatgtatatatttgtgcattatgcatacattttatgtatatctgtgtgtgtgtgtgtgtgtatatgcatattactaaatgttagtagagcttcatttctcattctttgattgtggtaattctaatattttcttcttacaccctagtgcatattctatttatcactttggaaacctctgctgtaatcagtaacctttggctgggcgtgggcgtggtagctcgcgcctgtaatctcagcactttagggggctgaggtgggtggattgccagagctcaggagttcgagaccagtctgggtaacacggacacggtgaaaccccgtctttactaaaatacaaaaaattagtcaggcgtggtggcatgcccctgtagtcccaactacttgggaggctgagacgagaattgcttgaacctgggaggcggagtttgcagtgagcagatattgtgccactgcactccagcctgggtgacagagtgagactctgtttccaaaataaataaataaataaataacctttggttcctggcctaagttttttattctttaccattctgtccttgaataacgtgtttaagggtttttaaacaattttttatactcatataatgactagttgacttgctgtaaccgtaagtagcaaacatctagcttgttccaaatgaatttaaaagatacaacacataagtaaaatattggtatgtacaaactatgtgcttctcataatctcacatttacctttttcaggaataggatgagtgataatccacccagaatggaagtgtgtccttactgtaagaagccatttaaacgattaaaatcccacttgccatactgtaagatgataggaccaaccatacctactgatcaaaaagtttatcagtccaagccagctacactcccacgtgctaaaaagatgaaaggaccaatcaaagatttaattaaagctaaagggaaagagttagagacagagaatgaagaaagaaattctaagttggtggtggacaaaccagaacagacagtgaagacctttccactgccagctgttggtttggaaagagcagctactacaaaggcagataaagacatcaagaatccaatccaaccatccttcaaaatgttaaaaaatactaaaccaatgactactttccaagaagaaaccaaggctcagttttacgcatcagagaaaacctctcctaaaagagaacttgccaaagatttgcctaaatcaggagaaagtcgatgtaatccttcagaagctggagcgtctttactggttggctcaatagaaccttctttgtcaaatcaagatagaaaatattcctcaactctacctaatgatgtacaaactacctctggtgatctcaaattggacaaaattgatccccaaagacaggaacttctagtaaaattactagatgtgcctactggtgattgtcatatttctccaaagaatgtcagtgatggggttaaaagggtaagaacattattaagcaatgagagagattccaaaggcagggatcacctctcaggagtccctactgatgttacagttactgagactccagaaaagaacacagaatccctcattttaagccttaaaatgagctcattaggtaaaatccaagtcatggagaaacaagagaaaggacttaccctgggagtagagacgtgtgggagcaaaggaaatgcagagaaaagtatgtctgcaacagaaaagcaggaacggactgtcatgagccatggctgtgagaacttcaacaccagggattcagtcacaggaaaggagtctcaaggggaaagaccacatttaagtttgttcattccgagggagacgacttaccagtttcattctgtatcgcagtcaagtagtcaaagtcttgcctctctagctacaacatttcttcaagaaaagaaagcagaagcccagaatcatcattgtgtccctgatgtaaaggcattaatggagagtcccgagggacagttatctctggagcccaaatctgatagtcagttccaagcatcacacactgggtgccagagccctttatgttcagcccagcgtcacactcctcagagccccttcaccaatcatgctgcagctgctggcaggaagactcttcgcagctgcatggggctggagtggtttccagagctctatcctggttaccttggactaggggtgttgccagggaagcctcagtgttggaatgcaatgacccagaagccacaacttatcagtccccagggggaaagactctcacaaggtaaacaagcttattttcaattgccatctgtcccatccaaaatgctctctctgccttttgaatttataagggtcaaaatactaacattttcagtcatttagtttattttcacctaggcatgccagtagactgcatataaagttgtcctgaaagaggctgggtgtagtggctcacacctgtaatctaagcactttgggaggctgaggccaaggcaggtggatcacttgaattcaggagttaagaccagcctgggcaacatggtgaaaccccatctctactaaggatacaaaaaattagctgggtgtggtggcgcacctgtagtcccagctatttgagaggctaaagtgggagatcacctgatcccggaaaatcagggctgcagtgagccgagtatgtgccacttcactgcagcctgggcgacgggaatgagaccctgtctcaaaaaaaaaaaattgtcctgaaaacattacttcttgcttcagtggtcagtagtggtggtttatccctctctttttctctcccccaagagttgagggttacactagggcaggctggcgatactgaaagcagttgagtttctgccttgagaagaggcatgtccagtagaaactggatgggtaaacagactggagaaaaatataaagacttgaaattcagctagatagaataagcactgtgttcagaatccagtcaggaccaggttgtacaagaaataggttctaagtttacaggacaagaaataggttctaggtttcaggcaaatgcaacatctaggaatttagagtagcaaagtaggatgcaggtggtaggacacaggtaaaactagccaggtaagacgggcaggcaaggcagataagtggaagtggaggctcaggaaatgaacagtgaagatcaaggaccagaaacggaggatgtggccaaaaacaaaagaaaaaatgtaggccacagagactaggacccaagaataaaaccagtgattgagcctggaaacaggagagatgaggcgagaagggcttggggcgaaagactgaacgttgaaactcaccttgattatgaatcaaacttcagaagcttcctagaggctccttttgctgatggctggaatcggttaacaggagggaagaccaaggcccaaggagccaggaagttcctgacagtcatttgaaatatctttgcttttctctgctgaatctcatctttagttatgagaccacctctctagttaaaatacataaagtttcttaagcttttctaggggcagggtgattgtaaagtagcatacctgtcgtttgtaaagtagcatacctgtcgtgtgtagtggccattggtgctttcatgcttattttgacaggagacctgtaacaactcagaataggtttgcaagagaaaaactggtattatctcttcctaaagggaaatcattttcttctctggtagattttgcaaatgatctcatattcactaaacctctatttgcctggtctcaaaatggatgtgtactaaaagcagaacattgctagcccaaagctacattttctttaactaccttctataaacaggcctaacgtctagacctttttgcacaaagttgtagtcacaaagtcaagccccttctccgtaataaacacatttaattatattaacatttgtgttgctttgtggttttcagagtgcctccatctgtattttttttattttgggcacaaggtggacagagaggtgggcagagtgaatttatcctattttgtggatgatgaaacaggcacagagagcataagtgatttgtccaagtttgtgttgccaataaatagtagagctgcaaggagaacctagtttcctgaggcctagtttaatcttttccactaaaccatgttgtagaaaatacaccataactaaaaccatgtttgttatagtgccatacttttctgtgtgtgtgtgtgttttgtttttttgtttgtttgttttttgagacagagttttgctcattgcccaggttggagtgcagtggtgtgatcttggctcacctctgcctcctgggttcaagcgattctcctgcctcagcctcccaagtagctgggatacaggtatgcgccaccacgcccggctaattttgtatttttagtagagatggggtttctccgtgttggtcaggctggtcttgaactcgtgacctcaggtgatctgcccgcctcaacctcccaaagtgctgggattacaggtgtgaaccaccgtgtccagccttctgtgtttttcagttgcagatgcacacactccccccatgataaatctctctaccaaattgaaggacttgtgtattttctgtactacattttatagtgcttaggagtgtccttgatacacacttttcattttagaggaaaaagtgagggacctgacgtttatctgtgatgactatgactatcgttatgctagatacattatgtcatttaatcctcataacagctctgagtgacaccactgtcccaccctcttattcctcttgaggaatctgagcttcagacatctttttttttttttcttgagacagagtcttgctctgtctcccaggctggagtgcaatggcacaatcacggctcactgcaacctccacctcccaggttcaagcgattctcctgcttcaggctccagagtagctgggattacaggtgcctgccaccacgcccagctaattttttttttttttaagtagagatggggttttgccatgttggccaggctggtctcgaactcctgacctcaggtgatcctcccgccttggcctcccaaagtgctgggattacaggtgtgagccaccaggcctggcctgagcttcagacattaagtgacttccctatgttcatgcagtaagtgacagaatcaggattcaaacccaggttcgtctgactctactaactattccaaacagtgaacctcaagttgagtttaaagaccacagatagaagagtcaggtgaacctggaggtattaactactaactctcccaaacagtaagcctcaagtagagtttaaagaccacagatagaagtcaataccttgtttgatatgttattgatacatttcactgttagctcctaagaatacaataataagatacagtaacttaaaacattaaattaccaaggttatgagacaggatataggagggaaaatagaattttttcttcagtaacaagttccttccaaatagtggtgagaaactattttaatcccttttattgctcatagtctgtaactaataaatgttgtacttagtttgggacttctacatcaagacagtaaataaggtgtaatcatcatagggcctctacttctattataaactgaaaaactattgaagttggatccaggatcagtgttcagactttgatgttaccaccaaatgaacacaagatactagaggagagagaccctaggatcaggtcaagccctgatccctccattggccaaggacttcaaggccatatcaatctatagggattaaaagatggtgccattggctccttaaaaagctttgtaatttcaccaggcaatgactgtctccaatgactgcaaattagagttttattggaatctttgcacaagagaatgggctataccttttctcactcaggcaagacctttgataggtcatttgcccttctcaggaagccaactcattcctttggtacttaaaaggcagggccagtgagctaacagttactgaattaactgcaggtcaggacagtaggctcacctgactggagaaagcagggcaaggtcagggagccacgtgatcctgacactgctgacaacatggttgcaattttcaggaagttgtctctttacaccgttttcctcaaattttttccaagatgaatgggttttttttttaagagactaaccttcaccttgcaagagaattatcttctgtgcaatttcttggaagccagcatgattcttttcattgttctttaatgatcatttggatatttttacatccacagcaacttttaccacacttgctaaacctgttgtcggtgtttaatttcttctttatcttgatgaaccaaaccaagactagagaactatcagtagtagagattacctgtcataaaacatggagaaaaccatgtacaggagaaatgtgattaaggagcataagccctcttttttttgtttttgaggcagagtcttgctctgttgcccaggctggagtgcagtgtagcgatctctgctcactgcaagctccgcctcctgggttcacgccattctcctgcctcagtctcccgtgtagctgggactacaagcgcccgccaccacgcccggctaattttttctgttttttagtagagacggggttttacagtgttagccaggatggtctcaatctcctgacgtcgtgatccacccacctcagcctcccaaagtgctgggattacaggcgtgagccaccgcgcccggcctgcataagccctcttttctggttctgcttaagttattcatgcactgaacataaataggaaatgtttgctggccaataatagcgatagggtgatagaacaggcatgttgactgtgggcaagtcacaatcataaaaggagaaagtcacgcttttagctgacatgtttagcagatgatagaatatgtaaaagaggccaggcgcagtggttcatgcctataatcccagcagtttgggaggctggggcgggcagaacacatgaggtcaggagttcaagaccagcctggccaaagtggcgaaaccccgtctctactaaataacaaaaattagcctggcgtgatggcgtgtgcctgtaatcccagctactcgggaggctgaggcaggagaatcactcgaacccaggaggtagaggttgcagtgagccaagatcatgccactgcactccagcctgggcgagagagtgagactgtgtcaaaaacaaaaagatgatgtaagagactcacttcatgaagcacatgcgcatcaatcacctggccagggtactcagcagaccaaaaaacaagtagacgccctgattttcaggggtcccttggccttttgaaaaacattttttcaacctgtaattgatttgactttcaacacttagctgcagtccaatgcagaaatctttaatgcacctgtttagaatatgctcttcctgaggcttagccgtggatccttcggcactggatgttagggaagggggtacgtttcggtaaacaatgacagtgacttctgtttggaaccatagtttctttgttggaacgaagctcaactcatataaggagtttggaaccccctgccggacttacaacctccaacttctctctaatgaggctcttgggagctgtacaaaaaggtgaggctggagtttgactgttgtcttctgttgcaggttctgggcatttggaaaagtttctcttcgggctgttaagcaaggctaaagaggagaggaaaaaaatgttaaaatgtgtgttgtcttcctagttttccatttgtctgtgttcattttggagttggacataattgaaagcaccaaagctaataacagctaccatttattcaacagcttgtattttttaatacctacccccaactttcccttgcccacattgattgtgcctcctcccaaagccagaaaaactctaaacctcaagttaaccagttgtattagcctcctcccactaaagattttaaccaagcacccaaaacaagagtaactaatttgaatctagtcaagttaaggttctttgatgttagcctttatgtgtttaaaatatgtgcgtgtaaatctctgaattacagttccatcactcaggctaactgggaaaacttgaatgactcgcggatactggccctagtttcagttgctgtaacaacaagccgtgtttccttttgaacaggctggatcaggtgcaacaccaccataaggaagagtggattcggtggcatcacgatgctcttcacaggatacttcgtcctgtgttgtagctggagtttcagacgtctgagtaagtctttctatatttctagcctaaataacaggtcccattccgttatgtggacctccaagggattctctgaattttttttttttttttttttttttacagctttacagtatctggcatgccctggtgaatgagctattgcctggggtttctgggttttatttttttgagatacagttttgctcttgttgcccaggctggagtgcaatggcacgatctcagctcactgcaacctctgcctcctgggttcaagtgattctcctgcctcagcctctcgagtagctgggattataggcatgcaccaccatgcccggctaattttgtatttttagtagagacggggtttctccatgtgggtcaggctggtctcgaactgccgacctcaggtgatccgcccacctcagcctcccaaagtgctaagattacaggcataagccactgcacctggcaggctccggggttttattagaggcttggttgtaatggcctgtataagatttgactagaatttacataattgcccttgtcctccatttcatgttgtcttttttttttttttttcccacccaggctagagtgcagtggcatgatctcagctcactgtaacctctgcctcctaggttcaagtgattcttctgcctcagcctcctgagtagctgggactacaggtgtgtgtcaccatgcctggctaactttgtttttgtatttttagtagagacagggttttcaccatattggccaggctagtctcgaactcctgacctcatgattctcctgcctcggcctcccaaagtgctggaattacaggcatgagccaccgcactcagcctttgtagcttttttcccttccctgctaaaaggtcaggtacctaagaactgttaccctgctccaatggaaggtgcttttccttggtgcctaagagcacctttttggcattgaaaccaaacacctttacaccacaaaagagagaaggaggaatagaatacagctgtcacttaccaatgtgtctaagtcttattgctatctcagttaatctactttgaacacttaaaaaacaaagtgccattctccaagtttcagcttgcactaagtcttaaccagaaggaaaataccttaatttcatttatcttaattcaagatgtgtttgttcatttcttattgtattattaaaaaaatccttctagttaaaaagatgagtgggtatcaaaaatatcagcatttttgtataattaaatttttgtgctggtttttgtacaatcaaaaaccagtattttggggccgggcgcggtggctcacgcctgtaatcccagcactttgggaggccgaggctggcagatcacctgaggtcatgagttcaagaccagcctgcccaacgtggtgaaaccctgtctctactaaaaatacaaagattagctgggcgtggtggcgggcgcctgtagtcccagctactcgggaggctgaggcaggagaattgctagaacccaggaggcagaggttgcagtgagccgagatcgcgccactactccagcctgggcaacaagtgaaactgcatctcaaaaaaaaaaaaaaaaaaaaaaaaccaccagtatttttgtacaattaaaacaaaaagcccactttcagatgaaaacttcaggtgtaaaagtacaagataacgatgaattctgaaggccagcataattcacacactggacttcttaagaaaaaaaaaaatcacaatttgatgctaattgggattcgtttgatgaaatcagtgcctagtgagtagcgggtaggtccgacagcaggaacaaggcggcagcactcctgcatgctggctgggatggcctcgccgccatctcttgtatcagacacctggccatgggtgaggaaaagaagtgcctttctgatcgtcctgcataaatggagaggcccaaaaccaagagtcatttctcccacagagaaaagggcttttcttaaagttttaccagtctgaaagggattgtttgatacctgacattaatgaacagagactgaagaaagtgaaacaaacttctcattgtgcttaatactctatttctaaacttataaaacaaaaagagaatgatctgtagaggcaaaagatagtaacagtcattggaagtggcctctcggatccttacatttgtctctgtttatccaaagagctgcagcggtggcgtaagtagtgttgacctggacatcacttaaagctctggaacagcaaagggcgtacagtggagacgactgcaatacatacttaacagtttaaaaatgtataatatttgggacagggagaggggagtgaaaaaaataaagaataaaattattggaatctaaaataatgatacaggaagtaaacgtattattaatatagacagatctggttctgtctggatgttcttggcttgctctcaggagcaactgagaattagagaaaaactagttttgtttaaccataaagttgttattcaaggagatgtgaagatgacaaagttcatcactaaaattaagaagtcacttctcagtaaaaagctagtatctcattaccattcagctatatgagataccagactactacctatatgttgatacaggaaagtatctgaattggcagaaaataagcccacatcaggcccttccccttagtttctttggggcccttgaccagatcttgataaggtgtgagaaacacaagagctaaggatgggcattcgagttgcaggtaagcctccgaaaaaaagcttacaaatatttttaagctgatttttaaaatagcacactaactataatgttaaatcacattttatacatcttaattgagtataataatgaaccggtggctaatgtatcatctcttcctggaaacttttcagaatcccacccctatctatccctttctcaagagtttctgtgcattactgagaaattcctctccatttgttagggttgtttttggctggtgggttttctgtgtctcttcatctcatcaaactattcagtgtctgattttttgacttctgctttggcccacagagagtaacttggatacttacaggtagaaaaagctttgaggaaatttaggcaacgttgatggataagtgtttccccaacctcctttctaacgtagagggttagttatatatcacacgcacacacccgtctgtctcagctttgcttgtggtgtcctcatgccaaaatacatgaggtcagttcctcttatgtcccagctcttttaaaactacaggaatgctgggtgcggtggctcacgcctgtaatcccagcactttggtaggccaaggcgggcggatcatgaagtcaggagttcaggatcagcctgtgcaatgtggtgaaatccatctctacaaaaaaaaaattgtaaaaagtagctgagctcagtggcacacgcctgtagtcccagctactcaggaggttgaggcaggagaatcacttgagcccaggaggcggaggctgcagtgagctgagattgtgccattgcattccagcctgggtgatggaagtgaaaccttgtctcaaaaatcccaaaaaacctacaggaaagccacagccagcatgtgttgacttgtatgtcgtttctctctcttctcaaagctggaatgctggggctactttttacctaccttttctattcccaatcccctgctcctttccatccctagtgggagtaatttaattctgcaacaaattctcatagttaaggtattcagcaatatatccctgtatcctagaattctctgtaaggaaaaaagttgtggttgaggggaagagttctacattcagttattttagtttaatattactaagaacttcattggaacccagaacaatcttccctgccgaaagagctttgtgcccattctctgtgaatgctctttaggagagatgcttaaggattctctccacacctccccatgtgtccttactcaagaccagaaactctcaaggtgagaaggtagatgagaatgaccttcagtaataccctctttcccggtcccccagttccctcgagcaggggcagcagaccccactgtgacccacggaccaaagccagcccactgccttgtttttgtatgtagtcaaaatgtacaaaaacaagccctgctcatttggttaggtggcatccatggctgtttcacacaacaacagcaaagtcgagtagttgcgacagaaaccatatgccctgaaaagctgaaaatatttactatctggcctttacagaaaaattgtgccgacccctgccctggaagagcacagtacctccatgcattggtgtggcgaagacgactggggattgccgctctaaaacatgtttggattaggaagcacgtttaagtaggagaagccttcgtgacttctctctagtgccttcgtgccctgtgttgcccactgaattgccctgtaacacctaagtgtagtggtagcattaagggatagcttttcagccctcaaggttatcaggagcatttgtatcactgctataaataaagtagtatcacttgtcataatcagggtgctgaaacataatgaaaaggtttaacttagtcacagtaaatattttatatccctgaaaataagttatttaatgagaatagaactatttaatgatccatgagtcctaaaaggatatctgccttgtattgccaagtttaaggcaaaggtgagatcctgtattaataagaagacagcttttttgtttgacattggtaagtaccaagaattctaactcacatatagtaggaaacaacaaaaagtctccactgacttctttgaattagatactgagaatccacaatacagtagtgtggataactttcaagaagccattggaaacatctccacattctgggatgacttgtaaatgtctacagagtaatggaaggaaaggcttccttgtctgctcattgctgccacctgggttgggaaaataattgaagatgttttctcaagtccttcaagaatctcttcttaatgttcagaatagtttaagagcgttgttgaggtaaactgatagctgattattttctgagatttagatctaaacaaactcagcatgacgaggaagcacacttcacagctccagggtgcaatactgatgtaaagttgcctcgtgaggatacatttttcgctcatgtatgcaaaattcctatcagttcatttgcacagccagttccaatcatgtatgtgatcaccagattaaaagcttcatccagaaagacaagactcctcagaacgaatagtagacaagtaagactgctacccacagaagccagtacgcttcaggtgtgaggcggggtaactactcatctcttcacagagccaaggaaagaaaaagaacgtctctaacatgatttaccattttaaacagccttataagttttgtctcttaaaatcatgctgcagaaggagggggtaaaagtcgtgttctgccctgtctgtggcattggagtgccccgctaggtaagaagcaacgcttagatcttgcttccaggcagcagcttgaattcccgaatcttcctgcaaggtgcatacaaatgcagcgtgagaatccatacacgtaatccatattcaccttcccatccatcccgcagaagaggcatggtgacacccaggctactgtccatgcttgagaggacgtatttgaaggttctgttactacaagttgggaatattcacggacatgcctgaataccccggctgtaactcacacgtggtctgtgtaagtggattaacctcggggcggccttgtttaatcctgaataatatctgaaagactgagtttacttgggaatgtgtagtttttctaatgcacattaaaatttattttagctgttaaaaataaaatcattttattatcagcagactcttttatactttatggggcatctacatactacttccgccactcttcataataaaattatttgtaaaatataaaaagtactcccctgagctgattatatgcctcttctagagcctcacctgtgaaatgggtgggtgtgtccctgggtaagttacccagtttactggagcctcctttgtactgtaatttagggataattattcctactttgcagacatttggtgagattagaagtcttacatgtgttaattccagcaacgtctgtgatggtaggaactcattgacagcagctgttctaaagcctgtagtatgtgccatcatactatatataaattccaaccttgaacggaggaagagaggccctactgcaatccacaggcagatccagccaacatctggggcttgctttgtgccgagtgccatgcaaggttttttacatgtgttttctccttttagtttcaaacagtcctgtggcgtaggtgctatcctgctcattttccaaaaagaaaacgggcttgaggtagagtgatttgcctacgtagctctgtgctgttcatcacatagcagcccccattggtttgaactggcattcaaccccccaaaacccgactcctgggctccattcttttagactgccctgactggggactccagctccaggcaggccaggcacctgtctttttaccaaggtggggggccagttcttcctcacacatcccattgctcttctccattattccaaaaggctcagcacagccactaccccccctttcccagtggattaagttgcttggtattggcctttcatgatggcattaaaagatggtaataccgttaaatttttgtgttactaccttacctccccaggataagcctattttattccatctactgccccataatactccacacataaggtacagagtatattcttagatttaaataagccatacagggaagcagctgtcatgctaaagaaagccatttgagttaattgccagttgatagcggcagctgaagccatatacagaggagctgccacgtgcaacccagacctgttggtaggagctgagcaaagtataatgatcgtggatttcccatagactcgagcttttggttttatgtacattttgctcccgttttatggataactcgttcctgccaatctgcctccaaacctgttgtatttttagtagctcgttcacttacaggatcaaaagaaataaacctgcctgccacaggctacttctgcacctcactcataccctgcttaggatgacagcaggcttactgtggaacttgggaaacagaatcccatagtaagaccattgagcatcttctcctgaccataggttagtttttaataactcctatcagttgagtcttactgtacttactggcataatggcctggtctttgacacaaaaacagaaaaagtgaatggcatgactttttgtaaattcagatttctaaagatgtctagggaaccataggagatggttagctacctttgtgaggaattggatggattctgcttgttggtgaagcttatttcaggcattcaagcccagcatcacaatcccagagaacgaggctggcacataaaagcaactgtacaagaaaagtcaagggttctgccactcttacctgtcatcccaataaaactattctcttgcagaatggagactgcaaagctcaggacagtttagaagctatgagaatgaagatatgatcaaacatgattttttttctttctgataaaccagaagataccagaaaaaggaaccaggtgatacgttccctcccttaaccatactctgccctcctgccaaagaagaattttaaggacgttatgtacaagtaactgaatagtagtaggcaacaaagtgggaaatgactgttccttttgcaggaacagtcttgtctagcaggagatgccaacaggatggtttacagtatcctctcattctcccctaattcacactcctatctgctgcagaaaaggagtcattctccagctccctgatcattccttgccctcccagctctcagccaagcactagcccagccctgtgggttcctttgtccaccctgtggcacaggccctgcccttgacccctgatccccaggcaggagagcaggcactctgttggggatgggggtttccaagcttccacagcagaaataggaggtgctgaatcccggggccggctggcaagctacagctgaagtgcagtcgtgagaaaacacctactgcagatagtccctgtgtgcagacaccaacttcacagagggccgggacgctggccatgcatttagggtgaaaccagggttcaagatgcctttagttacagttttaagtgccaaaagcatacctttccatcaaagttaggctttcattgtaaatgggcttgtaaattccccgcagtcccacagatcgcctcccaccttctttcaaagcctgctcagaaccagcagggactgtcttcctcccaggccatcaccctcccagcatccagtgctcggaggccccagtagccgtcagtagctgccccagtgttggcgctgtctggcctctgtgatacttaaacaggtgtccaacattcagtcatctagaccaggggtcagcaagctttttctatagaacaccaaacagtgcatattttatactctgcaggctactgggtctctgttgcagccactggactctgccattgtaagcaccagaacagccatggccatgtcccaacaaaaccctttatgagcactggaattaatttcacatgtcacaaaatattttgattttcctcccactttttacaaaccattcttagcccctcgcctgtacaaagacaggcagcaggctggacttggcccacaggctgtagtttaccaacccctgacataggtgctcatcaacacttgggtctatagagtgtgtgtgtctctccatagggactgagcacagttctcaatcagggccagccctgattccaaaaaccatgcgtgctacccagctagcagaaggaaagccttggactggtcaacagagaagtcctaccctacccacagcagagattctagaggttggagagtagtctgggaggaacaaccacatatatgtgtcccacatgcatgatgacatgcctttcaaaggagagtgagggttcgctgggaaccatgcagtgctgctgggtgagcttccctggggagcagaaaggagtgggaataaagggatgagggatgacggcacgtgcctgcctgcactcaccttcatgtaactcgggttgagtaaaagattcatcttgggactaagggaagtggagagagagacgattacagcccagctctcgccctcccatcttctgctcattaacatgctctgcgccagcctgctgcagatttcatatttcagaaccctgtagggaagttgccctcccttagccagggcgtgagggagaattacagaggactggggagaaatgggcattaagtgtttcttctcttattactagaacagtttgtgaaaagatcgacacctatccccagcatgaatacacattaagaggatgggttagagttctgagattgccagggtcaggcagtggtgccaggaaaatactggagcggatgcttgccagatgcttcattttccactaaggaccagcgaaggtatggaaagatctagaactagaaggccaggcctagcactctggtgggagttggtaactgagggatcatacttactgagcaaattggcacttgggtccctcggggcagaagccaactaaatagttgagacacattattctggggacatggcggtatttacacagaggacctgctgagcaaagagaaagtgatgagaaggatccgcttcagcaagaggggaaaacacacatgaaaaagctccctaggaagggtgtggatggtcataggggcttcacttaataggggtggataaatcttcccatcctttctgtaccaccctaaagcatccacttctagccatgagacagggatggggaaaaggaaccttggaatgtgctggagcaggtgtcagctggcaagttctgaaatagagttggaaatgtcactgacatgctgtgtcctggaggactgcatggatatgaaccacactttgttgccttttatttatttaagtatgggaggtacagctgagaaaaagctgacctggccgggtggggtggctcacacctgtaatcccagcatttgggaggccaaggtgggtggatcacttcagcccaggagttcgagaccagcctgggccacatggtgagaccctgtctctactaaaaatacaaaaattagctgggcatggtggcacacacctgtaaccccagctacttgggaggccgaggcaggagaattgcttgaacctgggaggtggaggttgcagtgagccaagatcgcaccactgcactccaacctgggtgatagaaagaaaaaagctaaccccacaatcctactgatcttctcagcagccctcacccccgcccagatccctaaaaccaacagcactaagaactccgtaagaaaaacctatctgaagacaaaggagagggagaaaccctgttgcttagggcatgggaaccctgctggggtaagctgcctcttaaatttggctggcagcaatgggaaaggtaggacatgcttaagcaacactcaggaccccccaggtgggtaagtggaatgcggaagagagcacacatgaactaagcgtctcctatgggcctgaccctgtgtcaagagcttcctgtgtggttcagtaacttggagaaaggcatgcagctgatacatgctgaaggtaggatttgaacccaagtcagtctgcctcaagcctgttatggccccacaccaggctgtgttttgtgtgtcacagcagagctggaggagaactacagaaaggccttctatttggggtttctccaaggcacagcctcatcaggaaaatggcccctcccctgctgagagctcccaccctgatccccacagcccctagggctccctggcttccaaggcctcaccgtccttgcagaaaccttggtcataccaaggacagtcctgggacttgaaagctggcttcacatggaggaaggaacactccttgttgctgcagtcacctgaaaatcccagcactctctgtagaagcagtttctctttgtgatcacttctgtgtccccaaaccagattgaccttgcccctcacaaacacagaagacactggcctttattctgggagtcaccagctttttgaagatggaaagtatgcctaatccttgctgcagtctaaaaagggtggatcccagtcctatttgctaagcagggcatggtctgaatatacacctctggaagagtaagagtgagggaccccagatggagaaggaggcactggaactgaaggccattagaggctagcaggaacaaggagagccgagaaggcctgcgacgttaagtggagatatttccatgtcgctgtaactgcagccccctcttcatctctactacaaaacccatgctgcctgcagagcctagggaagctgttccccttggtggaaatgcaaagaaaagcagagccctgctcaaggtggcacaggtatgaaaagaaacattctacagagtgggcacctgcattatactaagcctgcgtcatcatctctctatggattagaccaagtctcaggtttagtttatttcctacagggagccagcccagtaggcccaggctacccaagtgtcattattattattattattttgagacagggttttactctgttgcccaggctggagtgcaatggcgcaatcttagctcactgcaacctccgcctcccgggttcaagcaattctcctgcttcaacctcccaagtagctgggattacaggcatgtgccaccacgcatggctaattttttgtattttagtagagatggggtttcaccatgttggccaggctggtcttgaactcctgacctcgtgatccgcccaccttggcttcccaaagtgctgggattacaggtgtgagccaccacgcccggacccaggtgtcattttaagagctctcttagatttctcttaggaagaaagctctgaaggaagcatgggggaagattcatcccactttcacttcattcaagttgagaactcatgaatctttccaacttcatcctccttaaatgtctacagctcagtgcttttcagagctgaaggagcgtcgtagcgtctattccactgattttcaaattgctccaggaagatctattttatacactgggcctctacagagcaaggtttcgcctaaaggaaagtacccctaggccaggcacagtggctcatgcctgtaatcccagcactttgtgaagccgaggtggtgatccttaggatcacctgaggtcaggagtttgagaccagactggccaacatggtgaaaccccatctctactaaaaatacaaaaattagccaggtatggtggcacgtgcctgtagtcccagttattcaggaggctgtggtgggagaatcgcttgaacctgggaggcagaggttgcagtgagtcgagattgtgccattccattccagcctgggcaacagtgcgagactctgtctccaaaaaaagaaaaaaaaaaaaaaaaaaggagagtacccctgattcctaagagtttaaaaccaccattctttcccagccctctcatttcacagagaacgccagggctcagagaggggaaaaggccacatccatttcattcagcttcctcacgttcatgaagggttcatttgttcattgtcagtatacagcactgggcagagtgctgactctgggcttgagctttctaatgaatcaaagtgacatcaccccctaggtgatgctggccagcatttgatggatggagataacagaaagtcatctacactggttgccgttctgctgcgtgcacgtctctgcattcctggcctggccagcaggtggcagcagcacctcagccttcaatccgcctttcagagacgggggtactgggctgaagaccccggacaccagtcccttccagtgactctgtcccactcctacacctccccaacaacactctgattccaattagagtgatcatcactttgatattcgaaagccatatgcattcatttactgtaagaacagtagattacatcttgtaatcatgggcttacaagtctgtcctctactaattggagttatctgggggcggagggggacctggtcctgttcctgtatccatgcccaggagcacctgatccccaaacaaacaccgagggctattgagggaataactaagtaggtggcattttattactaaagtcacagaatgctaggcagtgaccaaggggaacttggataaacattgtcctttcaggggagacatgggggcagctctcaggaactgccatgcctttgcctcccaggagcaggcaggaaatggaatattagcctgggtggggctctgactggcctaggcaatgctttgcctccttctcaggtacccaggaccctcccattggcactaatgaggagcagccgcttggggggccctgaagctggctgcagccacatttggaagccaagcctcctgagtcaggggcatccaggggattctgccagctctctctttgtaggtcactctttatggaatacagttggaaaaccactggactagataatccgtaaggctccttccagctccgaaaagctctgagctgtagaatcgtattgtgaagggtgagacctgaagcacatttacaaattcctttcttaagtaagcgggaaagtggctgcagctgccccataaacagtcccttgattaaaaggacaaaggaggccgggcaccgcagctcacaccaataatcccagcacttagggaggccaaggcaggtggatcacctgaggtcaggagttcaagaccagcctggccaacgtggcaaaaccccgtctctactaaaaatataaaaattagccgggcatgttggtgggtacctgtaatcccagctactcaggaggctgaggcaggagaatggcttgaacccgggaggtggagattgcagtgagtcaagatcacgccactgcactccagcctgggggacagagcaagacgctgtctcaaaaaaatatataaaaataaataaaaggacaaaggatgccttgaagccagagggaggtaagatgctggtccaggcttgaccgcacaagatgactttaggtgctagacctctgaacctcatggatttatgtttacaatgacctttgatttccaacaagtgatgctagttctccgtttatggaaacaatgcaaagtttcttctaaagtaagagttaaaatagcaagaccgttggaagagcagacagtggtgctggggctttgagggtacagcaggcatcgtgaatgtggctctgaaggcctgatattcgagaagttctagccggggcctgagagatggctcatttgagacatttcaatatagtcaggctgggtgtgtgatgaaccaagaatggggagagaaacaatcccttcttcccttttgggggtatctggtatgcaccttgatccagggggcagtaaagggcagggacttcagggtgcacttctgcttgtctaggggtttggagaacagacacctgagactcagacaggtctctctggcctccagggacatgtccagcctcctctgcgtgcccgctcctctagaaaccttcccatctcacagcccacactgccaccctccagggtgaggcaccgagccaggaagaggccttaccaaacttggagtagaagtagcactcaggcatcctggtgaggtcatactggtgcaggaacttgcagtgatcacccttcttgcagagcccccggagccagtgcttgcataccaccatcttctcccctcggtcatgtcggaaggggcagagtttccctggagatgccagagcacctggctgggaggcccctcatccacagcctgggcccagctcagccctccaggggattccccaggagggtacctgactcagtccccagcggctgtccccttatcccttcacctggaccctgtaggggctggaactgggagccgaggcagcatgaagggagagctttttttttttttttgagacagaatctcgctctgtcgcccaggttggagtgcagcggcgcgatcttggctcactgcaagctccgcctcctgggttcacgccattctcctgcctccatttcctgagtagctgggactacaggcgccagccaccacgccctgctaattttttgtattttttagtagagacagggtttcaccgtgttagccaggatggtctcgatctcctgaccttgtgatctgcccacctcggcctcccaaagtgctgggattacaggcgtgagccaccgcgcccagccaagctcttgtttttgagatggcgtctcgctctgttgcccatgctagagagcaatggcacggtctcagctcactgcaacctccacctcccaggttcaagtgatcctcctgcctcagcctcccaagtagctgggattacacctgcaactacacccggctattttttttatttttagtagagacggggtttcaccatgttggccaggctggtctcgaactcctgatctcaggtgatccatccgcctcagcctcccaaagtgctgggattacaggcttgagccaccgtgactggccagggcaagctcttcttaaagcacagctgttcccactaccacacctttgcccatccttcccatctgcctggagtgccatgcccttctccagggaagtacctgggctcagaacagctgcctccttttcattcccagagtgcctaacaccccctctcgtcctgccagggagcggggccaggctttccagcccagaatccccacacccagcccagcccctggcacatagtaagtgctcagtaagggtgtgttgaattcccatctttaaaaacatcaaatgttatgcttcccgattccagagacctaacagggtgacagaagagccaactttgtaatgatttataaggaatattccatggaaatgttacatttaactgctttatcatcttcactcaagtctgccttgctattagcaggaaggacacccagttcctaagtttctttaatttatttatttatttgagacaggatcttagtctgttgcccaggctggagtgcaatggcaaagtcatggcttactgtagcctcaacctcctagactcaggagttctcccatctcagcctcccgagtagctgggactacaggcatgcaccaccacactgagctaatttttttattttttgtagagacagggctttgccatgtcatccaggctggcagttcctgagtttctaagcaggtccagcctcatgcctggccagttctctgacataatttgggggctaggggaggtgttctttccatttttccttttttaaaaaaaaaaaattatgttttgtagagatggggtctcgctatgttgcccaggctggtcttgagcgattctccagcctctgcctctcaaagtgctggaattacaagtgtgagcctactcccccggccaaggtgctctttttaaatacccctaacctccacccctggctattgacttgcttggttctgaccttccaccataatagctttctttctttgcagaagggtgttgctaggaaccactgctctagggactggttgggctgagctgaggagatgccactcagtccacattgagcctgcagggtcctgggtgcacaaggccttgggcgaccagtgatcccatttcccttctccctgtatggtctagggctggccccaagacaaacaaggcaggtgggcgaacatggccccaggtcctcctttcctggtcccctccagccccccagcttccagggacagactcatttggatcagaaaacatgtcctaaactctcacaccagtgagatttcttaacctaaatgtataggcaagcgggaggaagacagggaaaccctaaaactggaagccagttttttttggcaattgtatatttctgttgaaagagcctctacatgagccatgagccagaagaaaagttgaaaactcttatatttgaatcaggccttcccagaatggctgcatttggggagaggggcctaggaagacagtattgacccaaagtcagggcaggagagaagtggaggatgctttttgatagcatttcaaagatggtggcaggtgctacctcagggcatagggaatggatgagacaattgaccagtttacaaactgagtcagagcaggggactgggggagaaggatgcctctcttctagctgggaggaaatcaagaaaaacattaagaagctggagcctcctgggaatgcacaggccaaagctcagacacacgcccatcccagcaaggcagaaagaaaaaaatacccctttccaggcagcctggttaccctgatgcgaactgcaaactatgaagactgctgctgaggcgggaaaatcttaggggaggggcaggctgctcggtggatccaaccacttatcctttgtctacctgtaagtctaaaattctgctccatggccgggcatggtggctcacgcctgtaatcccagcactttgggaggcccaggcaggtggatcacctgaggtgaggagtttgagacccgcctggccaacatgacaaaactccatctctactaaaaatgcaaaaattagccgggcttggtggcatgcacctgtagttccagttactcgggaggctgaggaaggagaatcgcttgaacccaggaggcagaggttgcagtgagttgagatcacgccagatcactctagcctgggcaacagagcgagattccatctaaaaataaataaataaaataaaaataaaattccgttccatcccaattttccctccccaggtgcaaattcgacaccctatcccaggccaggcagagcccctgctgggtgtagctcagacagaccctacactcacccagcttggggcccaggcctgtctgctaactcacctttctcacagagccctttagtgaagaagttgcacacagctgaggccgactctggaaggagaagagggaacggagaaggtagcttccccagaggctgcagctgttccggaagcctccacctccatcggcatgtcccacctagacctcccccaggctctggcctatgggatcccaaatctgggccctgtagaggttaacctgcagagccagccagcagacctcaacccttaaccccccaactctgaaacagaggagctcgaggggctcaagcctggcccaggagctcgggaggccagtgtggcttctctcaattcaccgtctctctgtgcctctctttctcagtctggaaaatgggttgccccgaagccacagaagagagagacagagaaggggcggtcgcatcagggagttgagcagagaggcctgtagagaaggaagggggagggaggctgggcgtggtggctcatgcctgtaatcccagcactttgggaggccaaggcgggcggatcacgaggtcaggagattgagaccatcctggctaacatggtgaaacccggtctctactaaaaatacaaaaaatcagctgggcgtggtggcgggcgcctgtagtcccagctcctcgggaggctgaggcaggagaatggcgtgaacccaggaggcagagcttgcaatgagccgagattgtgccactacactccagcctgggctacagagcgagactccgtctcaaagaaaaaaaaacagagaaggtaggggagggaaagtggccccaccctcactcactgtccatgccctggaaaggcaggagcccagtgcccttctgcatctcgacatccttctcgaaggcaaaggtgaaccgctctagccccgcaatgacctcttgcatcttccgtctcctgctggggctgcggaagctgctggaacccaggcaggtgggcccaatatagctcatcagaggcccttaaggggccagcgcccaatgcctcccccttcaccccagggtgccagtggccaggtgactgcaggggacgctccagcctgggctgtacaggagcagggcccagctgcctcacccggcccacccagtgcaggggcagacaccccagggcccctcacccccacactgtgtacacaaggctcactcggatagggagggattcgcagagccccacaaactgcttatctttgcatgttaccgaacacaaacgtggcgtgcacacagacattaccaaacctgggctcatactttgtccatgaagacacagccacaggttagcaaagagttgcacaaaccaaccgcagcaaggctgttattctgccagagctgggggtggtgggggtttgcagagggagggagccgtcccacctccccgcttcttcccatgagggaaggggtctccctctggggcccctgacaccccttttctggcctgagtgacaagccccgagtgagctcttcgtgggagacagggaaaaaggaatgaagaggagaggaactgaaacagttggatgaatggcgctttgtttacctcgcacacaatcgccagcttggcgggagggcggaaccgaccaaggccagggcggcctcccagccaggattccacagggccacccagtgccaccccacccctgagaaagtgctttataaatgaaatctctatgcaaatgttgttttattattattacaccacccctgcctgcagggctggggacatctgacaatgctttcaaaggagcatgttagggctctaattagaccaggttccccctccccctgctctggccccaaactggccttgcctctaactagagctgctgttctcagtcacattggcttttaatgcccatagaaccagaacccatacgccctcctttctgggtgcccaaacccagcagggagaggtgggcagccccgcaggctctcagctgggccaacatgaactagcctgctggctgttgttccccgtggctgttgctcctagatctgttcttttgaactccagatcagaaaagaaaatagctggagagatagacacctggagccgaggtgggactgggaggagcagggacgagatccaagagtttccagaagctcaggcctctgactgcatcctgggagaggcagagggacccagctccagggctagagggtggggccaagggggtccctggggtagaaaccctggcttctcttggccttagttgtatgcgttgattagtagtcccaagaatgcattcatctgtcaacacaggctcattaaaggctcacagaagcctggcagcgcaggcaggactgatgagggaatcaaagcccagggaggccaagaccacatggtttgggaggcgctatggatggggttcacatctaggtctcttgatgacttccttccctaaacatccctgagcatctctgcactagggccacgtccctatcctcagagatggccccatcaaggaggggacattagccattcacacaataatgcgatggaggcatgaggggcccagcagggcaggaaggggtagcaggcagagctctctcaatggagagtcatgatgatggggagagaatgttctggaagaaggccagcagtatgaaggttggggcatggagcaatgtgaaggctgaggaggcgctcaagggtttggtttggcagaagcgggggtaaagaggtggaatgggggcaatgaggcttaagagctgagaagggacccaactctggggggcctgctggggccagctttggggggaagtgatcgtgaaggcagcagagccaccacagggctctgagaactgtacatggctctctgagggatggtcgggggaagactggacaggggctgcttagaggatgaattttttttttttttttttttttgagactgagtcttgctctattgaccaggctggagtgcagtggcgcgatctcggctcactgcaacctctgcctcccaggttcaagcaattctcctgcctcagcctcctgagtagctgagattacaggcccacaccaccacacctggctaatttttgtacttttagtagagacagggtttcgccatattggccaggctggtctcgaactcctgacctcaggtgatctgcctgcctcatcctcccaaagtgctaggattacaggcatgagccaccgtgcccagcctggggatgattttttaaaatcatgagagccctggggatatagcccagagatctttctgctactctggtggcctgcaagagttaattgatgagggatgaacatgaaggagactcctggttaagactcctccctccagcaccccagcttctctgctcctccaccaggggcttcccatcccacttctaggtgcctggccagcagaggtgtgtggtgggtgtcacatggatgaaatcccttctcccagtggctcatcattagtttggcacacaaacaacggggcttgcattcatagtttttgcttattcaaaataccttctgcagtaaattgaactggctacccaaaaagtctaggtctaggccaggtgcagtggctcacgcctgtaatcccagcattttcagaggccaaggcaggaggatcacctgagcccaggagtgcaagaccagcctgggcaacaaagcaggactcccatctctacaaaaaattaaaaaattattaggtgggcatggtggcacatgtctgtagttccagctacttgggaggctgaggcaggaggattgcttgagtccaggaggttgaggctgcagtaagccatgattgcaccactgcactccagcctgggtgacagagcaagaccctttcttcaaaggaaaaaaaaaaaaaaggccaggcatgttggctcactcacgtctgtaatcccagcactttgggagtccaaggtgggtggatcaactgaggtcaggagttcaagagcagcctggccaacatggtgaaaccccgtctctattaaaaatacaaaaaattggctgggcgcggtggctcacgcctgtaatcccagcacttcgggaagccgaggtgggcggatcatctgaggttgggagttcgagaccagtctgatcaacatggagaaaccccgtctctactaaaaatacaaaattagccaggcgtggtggcgcacacctgtaatcccagctacttgggaggctgaggcaggagaatcgctggaacccaggaggtaaaggttgtggtgagccgagatcgcgccattgcactccagcctgggcaacaagagcgaaactctgtctcaaaaacaaacaaacaaacaaacaaacaaacaaacaaaaattagcagggcatggtggcaagcacctgtggtcccatctacttgggaggctaagtcaggagaatcgcttgaacccaggaggcggaggttgcagagagccaagattgcaccactgcactccagcctgagcaacagagctagactccatctcaaaaaaaaaaaataaaaataaaaataataaaaataaaaaataaaaaaaatcaaagtcttaacccctggtacctgtgaacatgaacttctttagaagcagggtctttgcaggtgtcattcgggtaaggatctcaagatgggacatcctggaattaggatgattcctaaaccgagtaactggtgtgattatgagagaaaggagagggataattgagacacaggcacagaggggacacagagaaggccatggggagacagaggtggagactggggtgacccagcttccgtggatggccaaagattgccatctgcaccagaagccaggagagagatgtgggacagactctccctcagagcctccagaaggaaccaaccctgcctatatcttgacctcaggcttccagcatccagaatgtgagagaatgaattcctattgtattcagccacctttgtggtaatttgtgacagcagctctaggaaatgaatagaccttctcacttggcattcagattcaaggctgggcgcggtggctcatgcctgtaatcctaaccctttgggaggccaaggcaggaagatcactggagcccaggagttcgagaccagtctgggcaacatggtgagattccatctctacaaaaaatttaaaaattagctaatcatggtggcgcatgcctgtagtcccagctgctactcaggaggctgaagcaagagggtccctcgagcccgggaggtcaaggctatagtgagccatgattgcaccactgcactccagcctgggtgacaaagtaagactctgtcccaacagaaagaaagaaagaaatttggtttgggaagatcccacctttttttttttttttttttttttggctgagttttgctcttgttgcccaggctggagtgcaatggcgcgatcttggctcaccgcaacctccgcctcccaggttcaaacgattctcctgcctcagcccctcgagcagctgggattacaggcatgcgccaccacgactagctaattttgtatttttagtagaaacggggtttctctatgatgataaggctggtctcgaactcccgaccgcaggtgatctgcccgccttggcctcccaaagtgctgagtttacaggtgtgagccactgtgcctggccgacctcaccccttttacagatgagcaaacagacacccagagaagttgagtgattgttaagctttgctgaggccgggggagctgccccacctcatggctcttgaagccaacgagtgtccccatcgtacaacaacaaaaagcagtgccccagccctgggatgtcccctctgaaacctcacagccccctcttctgtgccctggagcttatccctagcccttgtgtttccgtttattaattgattcatggtgctaagtggacactcaaatcgctgtacaaacagaagtgtgaatttttaatcaccatcattatgaggctctcatttagctcgggctgcaaatttctgaatcgtcatcatccagctccttcccctttattaatgctctgctctgaaaagcgggggtggaggtggggggagctttggaattctctggctgcagggcctggcaaggtcattcatgcccatgcccccggcctgggatcaacggcagccagtgctttgctggacagatcgtggccatgaccacctttcttttatctggagtacctgccttcctctccacggagcgccctgcctttatggcgacagtgcagacaggggcgtcaggcaggtcagggttcaaatccagcctttgtcagctaccagtctacatcctgggtcaggcatttaatcgcctctctgaaccccagattctgcattagtaaaatgggaccaatgcacaccatgtccctggaggactgaggatcagtgaaagtacacgtggttgcctgtcacaggagtggtttttgttgttgttgttttatttttgagacagagtcttgctctgtcccccaggctggagtacagtggcgaaatctcagctcactgcaacctccgcctcccaggttcaagcgattctcctgcttcagcctcctaagtagctgggattacaggcgcctgccaccatgcctggctactttttttatttttagtagagacagggtttcaccatgttggccaggccggtctcgaactcctgacctcaagtgatccgcccacctcggcctcccaaagtgctgggattaaaggcatgagccactgcgcttggacctatcccttcttaaaatgcattattcctaagggcccctggtaaaagatgccatgggggaaggggtcccatgatgcttcaggtgctgctgggggctactgtaagatccggcagtgatggcctggcagccgaatagccacggggttgggaggggctggaggtcaggaggggtgcccctcacccgccgctgctgctgctcagtcccagggacaatgagccagtgttccctgctctctccaccgccctttgtgccccaagaatgccacttggaggggacagctgttggcttcacagtggccacttgaagtgcagggcagggaggccctgcagccaggatggtcctgctctgtcattgtgcaggaactcagtctctaggagtccgtcagttctgacacctgcacccagggaaagacatctacttccccttggggcttggaaatagccacaggactaataaaccacccacacttctcattcaaggctcctcccattctcaaggtaaacttccaagctgctctacccgttttataggtaaggaaatcaaggcccagaagtgaaaccactgcctaagcttatatagccagtagatgtgggaatgggggcctagaatccaacctttgctaccagttactaggacttaattggtttaggttcactgtttacgttgtattctctctaattcccacaaaaccttgcaaagagagctattattctttctcttctacaactgaaaaaagctgaggctaaaggcttagatgtgcttcctaaagaccacaagctcaggtctgcttggccccaaagccagctccttccagcctaccaagctaagcgtgggagacggctccacctcccctgggctgggaagaccacccagacccctgaggcccaagacagctactgagcctttgcttgttcctgagtaggtaggatgcagattctacttttggtccaaatatcaaggaaataggacattttgggcttagggagtcagccctgctcaaaggggtgtgcagatagcattccctgtccactgttgccgcgacgtttcttcacttggtcttcaggtcatcctccgccctgcctggggttctgtgcccagagcctctccaggctgagcagaggctgcccaaagcctccctgggctcagagggaaactccacaggcttcagcccctgccccccatgacctgtgagaaaggagcctgtcacccacagctgcaggcccggcctgtccgcaaagccgaagtggcagaggtggcaggtggggcagcttgggtcacactctggtctcctcctccttaaccacagtcctctggcttcccacgtctggctcttaccctccctcctctggggagctattcactcactcactcactcattcacttactcattcatccactcactcattcactcacttattcactctcactcatttattcactcactcacctattcacttattcactcactctttcactcactcactcatttattcactcattcactcactcattcacccatttgctcattcactcacttgttcactcattcactcactcattcacccattcactcactcattcactcactcgttcactcattcactcactcattcacccattcactcactcattcactcactcactcattcactcattcattcactcacccacttactcattcactcattcattcacccattcactcattcactcactcactcattcactcactcacccacttactcattcactcactcactcattcactcactcattcactcacccactcactcattctctcactcattcactcatttattcactcacccacttactcactcactcattcactcactcattctctcattcacccactcattctctcattcactcactcatccactcactcactcattccctcactcattcactcacttattcatccattcacccacttgttcactcattcacccactcattcactcagtcactcactcattcactcactcactcactcactcactcattcactcactcactcgctcaaaagtattttttaactgctgccgtctctggaagacacagaacaaacaagacacagccacttgcctaggagattgcactcggtagaataatgtgctcccatccaaagatgcccacatcctaatttccagaaactgtgggtgtgttaccttacaaggcaaaagggaccttgctgatgcaattaagttaagaatcttgagatgggaagattattctggattatctgagtgggcccaatagcaccacaaagatccttatgaggaggcagggtcagaggaagggagagacacagaggaagagaggaaaaaacagagagagatgtgaagatgctgtactgctggctttgaagctggaggaaggggccatgagccaaggaatgcgggtggcctctagaagtagaaaagacagattctgccctcaaacctgcaggaggaacacagacctacccacatcttgattttagctcagtgaaagccatctgggccttctgacctttaaaaatgtgagatattacatttgtgggccaggcatggtggctcatgcctataatcctaggactttgggaggtggaggagggtggattgcttgagctcaggagtttgagaccagcctgggcaacataatgagaccccatctctacaaaaattagctggacgtggtggcctgcacctgtagtcccaactactcaagaggctgaggtgagaggttggcttggacccaggagaaggaggtcgcagcgagctgagattgaaccactgcactccagcctggcgacagagccagaccctgtctcaaaaaaaaaaaaaaagtgctgtttgtttgtttgtttgtttgtttgtttttttgagacggagtctcactctgtcgcccaggctggagtgcagtggcgcaatcttggctcactgcaagggctgcctcccgggttcacgccattctcctgcctcagcctcccgagtagctggaactacaggcgcccgccaccgcgcctggctaattttttgtattttttagtagagatgggatttcaccgtggtctcgatctctgatctcctgacctcgtgatctgcctcccaaagtgctgggattacaggcgtgagccaccatgcctggccaaaaaagtacagttttaagctaccagatttgtggcaatttgtgttttctatttgtttgttttgttttgagacagagtttcactctgtcaccagggcaggagtgcagtggtgccatctcagctcactgcaacctccacctcctgggttcaagtgattcttgcgcctcagccacctgagtagctgggatgacaggcatgcaccaccacacctggctaatttttgtattgttttatagtagagacgggatcatttccatgttggataggctggtcttgaactcctgatctcaagtgatctgcccacctcagcctcccaaagtgctgggattccaggcatgagccactgtacccggccaatttgtggtaatttgttacagcaacaataaggaaactagtatagagaggaacgtaaccaataagcaggcagtgacatcagaaggcactggcggagctactacaaggctgctgagctctcacttaggtgttgcaggaaagcttctgggaggaagtgaaacaaaggcatagacatgtagagtcttgtcaaggcagaagggggacaatggttccagccgccgccatgcgtttaggaaaccacttctggttctataggatcagatctggcacactggctgctgggggtggctcgggggactgggaggtccaggcttgcgaagggcctcaaacctgggaccttgaggagtcactgaaagcccactttacgatgttgttgaaatttgcatttttactttattttttatttttgagatggagtctcactctctcacccaggctggagtgtggtggtgcagtcttgctcattgcaacctccacctcctgggttcaagcgattctcctgcctagcctcctgagtagctggaattatgggtgtgctccagtacgcccggctaatttttgtatttgtagcagagacaaggtttcaccgtgttggccaggctggtctcaaactcctggcctcaagtgatcctcttgcctcggcctcccaaagggctgggattacaaaggtctggaattactccagcgccgtgagccactgcactggtcgagatttgcattttagaaagagccctctggctgcaaagtcctggggccactctctagagaaggcatgaaagaaggacatccggcagccaactgccagaatctagaattggctgaaaagcagctccaggccgggcgcggtggctcacacctgtaatcccagcactttgggaggctgaggctggtggatcaccttgaagtcaggagtttgtgaccagcctggcctacatggtgaaaccccatctctactaaaaatacaaaaattagccaggtgtggtagtgggcgcctgtaatcccagctacttgggaggctgaggcaggagaatcacttgaacctgggaggtgggggttgcaatgagccaagatcgtgccattgtactccagcctgagccacagagggagactccgtctcaaaaaaagaaagaaagaagtggccgggcgcggtggctcacgcctgtaatcccagcacttttggaggccaaggcaagtggatcacctgaggtcaggagttcgagaacagcctgaccaacatggtgaaaccccgtctctgctaaaaatacaaaaatgagccaggcgtggtggcacatgcctgtaatcccagctacttgggaggctgaggcaggagaatcggtcgaacccgggaggtggaggttgcagtgagctgagattgtgccattgtactccagccacagcaacgagagcaaaactccatcccaaaagaaaaaaaaaaggtaaagcagctccaagaaaggaggcgtctttccccagtcctgctttattctgtactttctaaaacagggaaaatgcagaaggtcaagataaaccacaattatcaacaaagttttaatatttattcctatgccctaacggatggtcctgtgttcccctggggacgcataaccccctacccccatggggaggaggagagagggaagtttctgtagagcagggacccgcccgctgactgtggacactgtgttggattaattctcccagccgtggcccagggtgctcactttgatggatggtgggtccagggtcacaagtttgatctgtctttgggtcaactgagtctggaagaaaaactctattttcatcaccatagactgccctctggtctgttatctctaaataattattgggtcatgaggcagacagagagtaagatggaaaaaccctccaggccccgactattgacaaagagtcgattgtacccactttgtgtacaaagcccagtgagtgtgggcagggggagcgggaggcaaagcgcgggccccactcactccccgcctggataaactgccctgaccctggagggggtgctggagggagactcagtagagcatggcagaccaaggccaccccaccaccaacatcctgaccttccctccggtcgggggctcatcagactcggcgctgtcttttttaaatttatttattttttttattgagacggagtctctgtctgtcacccgggctggagtgcagcggcgccatctcggctcactgcaagctccgcctcccgggttcatgccattctcctgcctcagcctcccaagtagctgggactacaggcgcctgccaccatgaccggctaattttttgtatttttagtagagacagggtttcaccatgttagccaggatggtcttgatctcctgacctcgtcatccgcccgactcagcctctcaaagtgctgggattacaggcgtgagccactgcgcctggccgctgacttagcgctgtctttgctctctccttttggtgaggctttcaattccatgttctcatttgacggctcccactcctggatgtgttttctgcagacaaagagacagttgctccttgtcttagtcagctcgggctgctgtaacaaaatactgtagagagtgatttaagcaacagatgtttggctgggcgaggtggctcacacctgtaatcccagcactttgggaggctggggcaggtggatcacctgagatcaggagttcgagaccagcccagccaacatggcaaaacccgcatctctactaaaaatacaaaaattagccgggcatattgtcacatgtctgtaatcccacctacttgggaggctgaggcaggagaatcactcgaacccgggaggcggaggttgcagtgagatgagatggtgccattgcattccagcctgggcaacagagcgaaactccaaaaaaaaaaaaaaaaaaaaaaaaagcaacagacccttatttctcttagttctaggaagtccaagatcaaggtgctggcagattttgttcccagggagggctctcttactggctggcagatggccaccttcttgctgtgtctttacaaggcgaggagagagagactgaacgctggcctcattctcttcttacaaagacactgattccatcatggcgtctccaccctcaggacctcacctaaacctaatcacttcccaaagacctccaagtcctaataccatcacattgggattaagggttctgtgtgtgagttttgagaggacacaaacatttggtccataacactcgcttcacaacagcttgccatttccatttgaatcagcttccatgtatctgagatcaaactcaaactcccccaaatccattcttccctcagtctttcctgctcagaaaaagtgaaactgcccagacactcaggccaaaagctaggtgaatctttggttctctaaacatgcttgtccccgccattcacctcccggactcctcatcctctgagtctgatttaaatgccacttcttcagggagcacctaccccccatgacctgtgagacagggtctcactctgtaccccaggctggagtacagtggtacaatcatggctcactgcagcctcaacttctgggctcaagtgatcctcccacctcagcctcctaagtagctggggctgcaggaatgcaccaccacgcccagctagcttattttttgcagaaatggagtctcattatgttgcccaaactcctgggctcaagcaatcctcctaccttggcctcccaagatgctggcattacaggcgtgagccaccacacccagcccccagtgaccttatccaaagtgaggccccgggttattctccctctgagcgttagtctccctcccagcatctagatgtgtgtttccttcaaatcagtaccatgtttgctgcttttacttatcttcttgcttgttgagtgtctgtttcccaagccctccaacccaaacccttaaggccaaggcccatccgggtgacttcggcaacagttcagtagacacagtgccagggccctctgcccttttaggggcccacaaacgtgttctaatttatttgaaaatcagaagaaaatagccgggcgtggtggctcacacctgcaatcccagcactctgggaggccaaggcgggcagatgacgaggtcgggagttcgagaccagcctgaccaacatggtgaaaccctgtctctactaaaatacaaaaattagccctgcatggtggggcgcacctgtaatcccagctactcgggaggctgaggcaggagaattgcttgaacccaggagacagaggttgcagtgagccaagattgcaccactgcactccagcctgggcaacagagcgagactccctctaaaaaaaaaaaaaaaaacaacaaacagaagaaaatatgcaaacctgtaggtttatagcagcagagtcataaatataattttcacaatttttatggaggaaggggtccacacaacttacagtgccaccctgggactgtgttggctttgcctactgttatacctcccaacacatcccagagtacttggagcatggcaggggctcagtacatatctgatgaataaaggaatctgcactatagttttctttttttcagagaatacaacagcaaactctctgcagtcagcccagatttggtggagggttggggaagaaccacggttgtgagaaatgatattgatgcaggattgtcttcaagtcagccaggagatgacacagtcctctcactactctagatctgcaaggagaagccctctggcccatgccaccttctcaatacaatcctcgatctgacttcaggatgaaaaattagaaagctgccttggtacagccacttctcaagtatacccatgtagaaacattttactggctaataggaagtatcaattttctcaatcaagcaggcaattaaaaaatgtaagtatatacatttttcctcaagggactgcataaatttttttttttttttttttttttttttgctttgaagaaaagaatgtgacctaaaaactatttttgtttttttttttttttgagatagagtctcactctgctgcccaggctggagtgcagtagcacgacctcggctcactgcaacctctgcctcccgggttcaagcgattctcctgcctcagcctcatgagtagctgggattacaggcgcacaccaccacttccggcgaatttttgtattttcagtagagacggggtttcgccatgttggtcaggctggtctcaaactccctgtgatccgcctgcctcagcctcccaaagtgctgggattgcaagcatgagccaccatgcccggccctgaaaacacttttatttgtcttaaattggtctttatattttgccattacttttaacgacaaaaaatgcaattacatcttttttttttctttttttttgagacagatcctggagtgcagtggcatgatcttggctcattgcaacttccgcctcccgggttcaagcaactctcctgcatcagcctcccaagtagctgtggttataggcttgcgccaccacgcccagctaatttttgtatttttagcagagacagggttttgccatgttggccaggctggtctcgaactcttgacctcaaatgatccgccctccttggcctcccaaagtgctgggattacaggcgtaagccaccgtacccaaccctcaattacttttgcaccaaccttttaagaaagtggctcactcctcctttatgagcagtggttttcagcccctaatagggcatttggcaatgtcaggggacttttttttttgagacagggtctcaccctgttgcccaggctggagtgcatggtgtgatcacggctcactgcggcctcaacctcctgggctcaagccatcctcccacctcagcctccccagtagctgggagcactaggtggacacaaccacacctggctaattttttatatgttttgtagagatctggtttcaccatgttggccaggtcttgaactcctggtcttgaactcctgggctcaagtgatccaactgcctcggcctcccaaagtgctgggattacaggcatgagccaccgagcccggtctgaggacattttccactgtcacaatttgagggagtgcttggcatctaccaggcggaggccagggatgctgcaaacacactacagtgcgcaggtcagtccccagtaacaatgaatgagccagccccaaatatcaatagtgttgggttgagaaaccctcctctgggaggatctaaattgtgcctcttggatcatgtgggtctggccctccatagagtgggttttactgatctgtgccttggtatcaaaccctcaatttatcctgagtaactctgtagaaagcagctgatagggtttgtgtgactgtatctgtgtcttacttagtccatttggagtgctataaacaatattccacaatctgggtggcttataaacaacaaaaatttgccaggcacggtggctcacacctgtaatcccagcactttggaaggccgaggcaggcagatcacttgaggtcaggagtttgagacccacccagccaacacagtgaaaccctgtctctaccaaaaaatacaaaacatagccaggtgtggtggcgtgagcctgtagtcccagctactcgcgaggctgaggcaggagaatcacttgaatccgggaggtggaggttgcagtgagccgagatcacgccactgcactccagcctgggagacggagcaagactgagtgaccctgtctctaaaacaaaaaaggactgtcgttgacggtgttgcttgggacactacccgtcatcccttcaaaggtcccacgagaattcctctcagactttagtgtcagaaatagctgcgctgcttctaggttgagtgttttattttgctttttaattgagtcagaatcctgctctgttgcccaggttggagtgcagtggcacaatctcggctcactgcaacctccacctcccaggcttaggtgagtcccctgcctcagtctccctagtagctgggattacaggtgtctgccaccacgcccagctaattttaagcggagtttcaccatgttgaccaggctggtctcgaactcctggcctcatgtgatccacccgccttggtctcccaaagtgctaggattacaggcatgagccactgcacccggccagggttggttttaatcttgtggactttgtgagtctcaaaaccggcagatttccctctttgttttgactgatacgaagctcagaatcctgtttgcagtccacctttgaggattgtggagccccagccaaagaacatttctgtgtcctaccctcttggttcattgtaccatgtgttccagtgttgttttctctctgatctatttttatcctattgtattttatgaatttttgtaagctgcctctaatcctttttggaagaaagcagggcagaagaagaaaacaagattcatcagaaccctgtggccttgacaagtgtgttttaacatgccaagtgtcatttagggttggattctggccagggaaggcagctatccttggctcctcctatctctcctgggagtctctgtggagaacagcagctcagtaggttagagcaacaggttttagaggtagagccagtatccatctgcctgcaagcaccactccctcccaccaaaatattcttcccagtctcccatctgtctgttggcaggaagccacggggcctagaggagatcggaaaggggaagaataaagataaggtctcccattttcattcctaacttttatttctggcatcttaaatcagggccctcagggctcagggaaagatcgtgtacgtgttaagtgctgcgggtgaagggtggccaggaagggcacctgcccaagtgtggagggagtgggggccttggggagtctgtcatatgagggtcgaggggagccaggcaggggtggggagtgccacacacacctggaaagtcccacccctccatctcgccctgcgttcagggatcttccagccacccctgcagctataccactcccagctctgcacgcagtctgctgctcacgccatccctcaacctgtccctcacctcccaggctgcagcacccaggccagcccagagaattccacctgctctgctctgctctgctctactcgtgggactttagctaatctcttgtcctcccagcctcagtcttcctatctctaaaatgagcaggggccaggcacaatggttcatgcctgtaatctcagcactttgggaggccaaggcaggcggatcacttgaggtcaggagttcaagaccagcctggctaacacggtgaaaccccatatctactaaaaatacaaatattagccgggtgtggtggcaggcacctgtagtcccagctactcgggaggctgaggcaggagaatcgcttgaacctgaaagggagaggttgcagtgagccgagatcatgccactgcactccagcctgggtgatagagcaagactccgtctaaataaaataaaataaataaataaagtaaaataaaatgagcagggagaggaaactagatcctaaactttgaggatcctgagaatcccttgctgccttcatgtgtcctgacagcctctgtccctttgttctactttcttctgggaatgtggtgccaccttggtggagagaggaggagtggctgggcgtgtgtaactctggggtcaaagatggacaccacgcaggagtagcctggatgccagcaggagcacaggcccgaggctgcaggcttgagaggcaaggggcccaacccagagccctggtcctgcccagcagagccagaggccaggcagagcaaccctgagaagggcagggccttggccgcctggtgggcagaggtgacctatgggaagcagcagctgccgctgaagggggctggagcagccagtgcctccctgacacttcccttgggcacacagaaccgtgggagatgggcatgccccactctgagaggctgatagccccgtctctgtgctgcttggccaagccaggccaccggccccaccttgtcattccatgtccagctcctctgtttcctagacctgtggggtgggctggttctttcacctctagctgcttcccctgtaaaatgggggtgatatgaatggcatggacctcacggaattgttatgagaatgaactgaggccaatgcaaagaacaatgcctagcatatggcggtcatagctgctaagacatatggcccgtatcacagcggtgcagagcggcgtgtgcccagtaaacgggcgcacagccctatccacatgggggacgtggagggagatgctctggacccgctggggcaggtggcggggctggtgccaggacatcatcgggccagaaggctttgggtcccatcccattttggaaaatggtgactgagatctgaatttaaatgaccaaattattacccagaagtagttcctggttcctttagacagaaagggcccacagaacatctttaaagcaagaagtgccctgcggggccctaggtttctcaggtgaacctcagagaccaacggggaaagagtaaggaccccccaaatccaaccccacccagggaagctctggctcagcctccatagaggttcaaagtatgacctcatatgaggccaggtgtggtggcttgcgtcagtaatcccagagttttgggaggaggccaaggtgggaggattgcttgaagctaggattttgagaccagcctgggcaacataagacctcatctcataaataaatatataaatgaataatcaatcaattataaaaggctgggtgcagtggctcgcacctgtaatcccagcattttgggaggccgaggtgggcggatcacctggtcaggagtttgagatcagcctggccaacatgatgaaaccccgtctctactaaaaatacaaacaaaaattagccgggtgtggtggcgtgcacctgtaatcccagctacccaggaggctgaggcaggagaattgcttgaacccgggaggtggaggctgcagtgagccaagattgcaccactgcactccagcctgggcaacagagcgagactccgttctcggaaaagaaaaaaaaaaatcaattaaaaaaaatagcatgacctcattgcaaacaaagcttctggtaaaaagttgaaaacaactgagctactgcctaattttaaagatggagaaactgaagccaattggagcgagaaaataactggcccaaggctacccagcaaatcttttttaaaaaatttatttattggctggctgcggtggctcatggctgtaatcccagccctttgggaggccgaggtgtgtggatcatgaggtcaggcgttcgagaccagcctggccaagatagtgaaaccccgtctctactaaaattacaaaaaattagctgggcctggtggtgggcgcctataatcccagctactcgggaggctgaggcaggagaattgcttgaacctgggaggcggaggttacagtgagctgagatcgtgacactgcactccagcccaggcgacagtgcgagattccatctcaaaaaaaaaaaattattttttggtagacatgttgtctcgctgttacccaagttgatctcaaactcttggtctcaagggatcctcctgcctcagcctcccaaagtgctaggattacaggtgtgagccacggcgcctggctcccagcaaatcttaacagagctctgtggcctggctggttctgcgtgttcatctcatccttgtctcctgggtccactgaacccccagccagaaggtatgctccttaaagctgtgaatcaagccaggtccccgggtcttcttgaatgctcagagcttttccatcaatggtcaagaaacagattctggggctcggggcggctggtttctctgggcccctagggagtccctggttagtcggtgtaggtacagtcatttctctctcttgggaggttgcactgtgtctgggaggcacagccccttctcatctgcctggtcctcgcctgaacagtaccttcctctccccagtcatccctgagctagactgtagcccctagggacccgtctcccaatgggccccagctctcctccctctctcttcttcccttggggcagccagaagtccccgctcataactcccacacgaatgagcctgtctagggacagagggagggacctgagtgacattttaattatgcctctaattgctttccagggagatgagtggggaactcacatttctctgtgggtgctcaggggagagtgcagggtttccaccaggaactcagccacattgagatccccaagatttccccagatttcctgagagcaagcgggggcttcaacaagcagtgagccagccctacgcagaccagggctcccttctgaagctgtccagaaagaggggaacatgattcaagggaaggaggtggtagggcaggggcagggcagtgggttcaggggccactagaccctcaccccctgactttatatcccgaggttttgatgtgcccaggagtggtggggtgagaagggcaggagttttgaatgaattctgggcattagagaaggcggcctcgaggcttatctgatcatctttctccatctggaaaatggggatgtggagcttctatctccctgagaagtgaggttgaactgaggacctgccacttgtaagctgattttccaggcttaacggtaaaaggggaaagaggaggtggtagccccgctcccagcatcatgcagaaactgccttcagggccagccactttctggtggtgacagttccgtgcaccaggacaccagggggctggggagaacacagtcactctcatcctaatcacaactgtataaaaagcccatgtcgaccggcacggtggctcacacctgtaatcccagcattttgggaagccaaggtgggcggatcacttgaggtcaggagttggagaccaacctggccaacatggtgaaacccagtatctactaaaaatacaaaaattagctgggtgtagtggcgcacgcctgtaatcctagctagttgggaggctgaggcaggagaatcgcttgcacctaggaagcggaggttgcagtgagctgagatcacacccctgcactccaacctgggcgacagagtgagactccatctcaaaaaaaacaaaacaacaacaacaaaaaaaaaaaacaaaaaaaaacaaaaaaccaaccccctcccccacaaaaagcccatgtcactgtttctgtgcctcaaccctctaagagtggcaggatacccattttacagagcaggagagggaggcacagaacagctaagcgaccaagtgccaagggcttccaagagatggcagttagggacacctgagtccccagactctgaaggggcctgcccaggcagacagcatcgcaggaagggcgggtcctcacggacagagagacagaagccacctcaggcccccctggacagctctaggacctgggtccagaccccacccccatcctgaaatagccctcccaaaaagcagagacagacaccaggcgtgctttagggctttttttttaatgtttcctcactgttttgacaatatcatgaaaaaaatcagtttagaatctggaattggcctggacgggattcgagggcagctggcgggggctgcatagcccctgaggttcctcccccaccatgggacctaagctattggaaacaggagcaccaacagggcaccgaacctggaactaagttagtgtctagagtcaggcaagagaggagagtcaggcaagagaggaggggccgggccacagtcgccatggggacgcccctggctgtggttggttctgtgtctccccctcccctcactggctacatggagacagggaggtgggtcaggctgttcccaggacagaaaaataaccggcagtcaacctcagggctcatacccgagcttctgctcaatcccctcggggacagttacaggactcagagagaaacgtgaatttcagaaaaacaaatcatttttcacataagtgttccaaatattgcgtggggcatattaatgctagaaaattatcttttgtttacctgaaatttgcgtttaactcagcactctgttttggttttgctaaatctggccaaccctggcctcaaaagtcggtggggggaggcctgagaaaagaaagggaagtagtcagtactgagggtattgaggggagggagggaataactcagccaaaaagaaaaaaaaggctttccccccataggaatgatatattatttaaaaaaaaaatcgttctccaaaaatattctgcactggccttcctcagttgttaatagctatgggaggtgcgtagggaaaacacacacaccagacacccaccccatgtcattctaaataaagttgggaagcactaaagttgagctggtgtctttgccacggatgtccccagactccagtccgctaatcgccaccagactccagtccgctaatcgccactgtgaattttgaagaggaggcttagtataaaggttttctaaaaggattgattctcattctgaggcagacctattaacaccatcctgatattgctctataaggatttaaacacaataataaagaacaaacaagcccctagggactgagcgagtgccctagccctgttcctagtgtcatcctggaagggtcccttcttgcaattcacgaagcctggggggctttccttccattctccatcctgttctcttcccctggaaagggctgcgtttagtgcacatgctcgcagctggccccccgtccagctcagctccaaggggctccagatttccagggcaggagctggggtggggcagggaggggctgagaggcaagaccgtctccctcctgctgcagctgcttccccagcagccactgctgggcacagcagaaacgccagcagagaaaatgggagccgagagtccttagccctggagctgaggctgcctctgggctgacccgctggctgtacgtggccagaactggggttggcatctggcatccatttgaggccagggtggaggaaagggaggccaacagaggaaaacctattcctgctgtgacaacacagcccttgtcccacgcagcctaagtgcagggagcatgatgaagtcaggcagccagtcggcacccatgccagccccctacgtcctccgaagacccgagggccaggccagtgtccctcatctacaaggtccagggtccatggtctgaatcaagggtcctggctgcccctgcgccgtagggtcaaaggtcatagtggggtgggggcagggagaagatgcagccaagagctcccggtggccacccactgtccgcctcacacacggatttcatcctcctcctcctcatccatgaaggagaactccttgtctggctgtcttgagacagcagcccgggccctgtccggcccccggaaggcagggctgcgctcctccaggatgcctgaggtgcagctggagagggagctgctgtcccgtgtggtgtggctgcccatgctgcgggctgagccggggctgggggccgctgctgcccacccctcatcctccagagcatgggaggggagggagggcaagtctgggccagccttgccttcctgccttgccaggggaggggccgccacggcgtacgggggagcctgggtgatggtgccagcggcgccctcatcgccatggtaaccaccctccccctcctcggggtcccactcctccttgtccatgatgctgaggacgtcacccagcatggagggccccaggtcgatgtggaaggacatgatggactccgcatgcttcagcccgtacgtggccttgggcacgacaggcagatctgtcagatccccaaaggcctgctcatcgaggagggggtcaggggaatgtggacccgcggccccattccgacggggcactgcctcctccgtgcccgcctcctcatcgccgccctccccgtcattggccttcttcacggggctggatgacaggctcttgggcagcttactggtgcccttctccgcggcctccttctcattgagctggggcagggacatggcattcttgacaaacagggccgagtcccgcagggagcccagcatgtcacgctgctcccgctcccccctggtcaccgactgtgaccgcttgctgccccggaacttcctggacaggagactgcgtttggaagatgaagaagagggctgttcgtccaaggactcgccgtcgggctcgccagccttgctattgaggaaggaggtgtccccaaaggcgtctccggcccggccaacgtgcatggtgtggcggaagtcgcccagcggggcgctgatcatctcggccgtgaggtccgctcgggaacggcgcttggagtgcaccgagctggacaccagttgcttgaggattggcatcttgctggatgggcggggaggtgggccctcccgaggtagccggcaggtctggggtcagatctgaagtccaagtccagtgggcagagggggacgcaatgaggagatcataaggctgcaagcagagaatgagaggcaaaggattaacgcgggctggccacacggcacaaaagcctctttgccaggggactgtcatttaaaccccagcgctcctaccaaagttaaatgctgtgaaataagccagcaatccatggtataaccctgcctgtttcttcatccgcaggcattcagagtagaggagtgattttgcaaatctggttagagttccagtagcctcggacacactttccctgaaacttgagagagacagaacctttcttgcagaagacaatgcctcccctgcccctgcaagccaggatgctgccagagtaaacatgaccacatttaaggacgcgaaggtaaatccagcaattccaggcagcaagccagggaagagatggagtctatgagttggctcctatgaacagtcagcctggagatgtgctgtaagttcttcctgctgtctaacctcgatccctgtggagttagtggacaccccaccctgagtcctggtcctcagagagagaagggaaaggacaggacgggctcagggagacagaggctgaccagctcctccccctgcgtgggcggcacagtcctctttctgaatcagaactggggtggggctgctgggacccacagaaccagctccccagcctttcagccttcgcttggtatcccataaatgaggatcccgcctgtgacgtctccactgtggagccccaggctctttgctgagggtccaccttctggtgtctcggggagatcaagattgggcaacttccagtttctttcatcattaggggagtgggaggcagggactggaccctaaatgacttcgtccccccaggatctgcagactgattcctaggtgattcaccagaaatccaaaaaacagcagaggtagagcccaggagcctggaggcaccactctcacagctcctgacaagggccaagttgaagttcagcattggggccaaaccagcccctctcttccctagaggggcttgccccaaatactaagcccagcagagctgggcaggttggggagagatgggtgcagggatttaacaaagtatggtgggtgagaggtgatgcttggacaccaggtacctgcctgcctcccagtccagccagcagcacagttctgagaggcacccccagtccagacccactcttcccactgcaaaactcagatgctgggtgcttcctccgcatgcctgccgctgcgtcacacaagcccaccacaccccacctggcccctgacatcagcctgacaggtctccctgttggtctccctcctgtccatccttcacctcttggctaaaacaaaacccatccacatgacgccctacccagtgcagaccccttgatccaatgactagtccccacctcgctcctcagtgtcccctacttttgtaccctgatctatcccctgagctgcagtggatacaaacagttccccaatgcaacccctgccacacccagcatccttcagggctcagctgggacacatcactactcccaggaaacctttagccaccacctgccccccacggcactttgggagatgtcccctcttccagcagatactggctacattattctgtccctgctggctggactctcatcttcccactgcagtacaaacttctagggttttgaggcagattctcgccctgtcccccaggccggagtgtaatggcatgatcttggctcactgcaacttctgcctcccgggttctagcgattctcttgcctcagtctcctgagtagctgagatttacaggtgcacaccaccacgtccagctattttttttttttttttgtaattttagtagagatagagatggagtttcaccatgttggtcaggctggtctcgaactcctgacctcaggtgatccacccacctcggcctcccagtgctgggatcaggacgtgggatcagcgtgagccaccgcgcctggtccatccagagggttttaacaggtctgtttaccaccgagtctggtccagcagggtgtgacacatggtccgcctccaaccgcctccaagcacccactggaagtccagcacctccctcctctcctccccttctgcccacagcctggctccagggctcccagcctgacctctctgcatcctcacccccatccgcttccctgttctctcaagcctctgctgcccagcctcatggcttcccccaccagcaatgtcccccctcccagtgcccacgccataccgcttatcattccagcaaacacaaagttctctcgggcagggagggggagccaggcacctggcagacttgccacacagtgacgtgggcgaggacgtgagggatgccttgagatgatactctactctgggtcataggtcagctctctctcctccctacccttaggaaagtgaccttcccctaactctaacttggattatctctgggccccaccctcctgccccacctcaacctctaaacaattagacattgaaccgctagaccaaaggtcagcaaacactttttgcaaagggccagagagtaaatattctcggccttgtggctgatagggtttttgtcacagctactcaactgtcttcttagtataaaactagccgttggccgggcacagtgggtcacaactgtaatcccagcactctgggaggctacggcaggaggatcagttgagcccaggagttccagaccagcctgggcaacacggtgagaccccatctctacacaaaatcaaaaaaagaaagaaaggagccatagcaacatgtaaacaagtaggcatggctatgttccaataacattttatttacagacaacttctgggttggtgagcagatcgaggtgccaggaaggtggtgcgtgccctgccccccaccccaacacttgaccccacgcatcctcatgcagctcttccgtttggctgttcctgagtcgtatcttttgtaataaaccagtaaaagaaaaaaaaccaccaaaaagccacatctttatttacaaaagcaaacgcaggctgggtttggcccatggactgtagtttgctgactcctgaatatcatatatgaccctcttggccagccatgggctcctaggcaaaactctgaagaaaacaggaagggaggaagggagggagggaggaagggagggaggaagggaggggaaggaaaggaaggaaggaaaggaaataaggaaagaaaaaaagaaagagagaaagaaaaagaaaggaaagaaggaaaggaaaggaagagaagaaaggaagaaaggaaaagaaaagcaaggaaggaaagaaagagaaaaagaagcagcagaagaaaagaaaaagaaaaagagaaggtagactctgcctcagtcacgttgggcatagaagggaaaaaggccaagcttcaaacgaactctcgttcctggcaaatccttcaggcttctactgccaccagcagggacaccagtcaggaacggaggggaccccatcttccacctgcctgcaccccgactcctggctctacgcacagcatccaggaatctcaaagaactggaggggatattcagtgcagcactttcactttatggatgaggaaacaagtttattgaaggaaagtgatttatccaggtttttagcccaaagcaacagagctgggctagaaactgggtctttgagtccagagctctctccgctccactccaggcccttctccagctctggcggcggcattgctggtcagtgaccaccgaccactgagtgctcctccccactgctggccggcagggtacagagaagggggtacccaacagctgcttcaagaaggttcttgtgtaatcctagagcaggttccacactgttgctatttgggccagataatttctcatcgggaggtggacctgccctgtgcactgtaggatattcagcagcatccctggtctctacccattagatgccagtagcatccaccccccagtcacaacaagcaaaactgtctcaagatattgcccaatgtcccccaggaggcaaaactgccccagttgagaaacagcagccttgagtgagaacacacaggtgaagatagagcaggtatgctcaccaggtaaacaacaaagacagagaagcagggaggcgggtgtggatggtcagaaccgggtgagaacatggcggcacgagcccccagagctgcgttaagggtttcaacgccaaggcaggaacccccagaccctgtgagtgatgtcaggtcctgtggtttcccgatcttatacgctcattagagaggaaagaaagggaaaccacagacccggctccccaggactcaccagagaagctgcaggtcactgtggctgcccaaagggaccaaatatcctggccatgatggctacaggggaggacagctccccgcatcccattagccacaccacccagcacatccttgcgggtagaactattgaggtaggtcagaggggacagcagggaaactcagctgaaatcacggccatcctgggctagccctggggtccccaggatcttgttcaaccccacaccccagaaagacagggacaggtctacccagtgctgcctgctgccacggtctcgcttcctggggggttgggaacgagactttgtggcttgtagaaagccatcttcaataaccagcaaggaagggtcctgagagagttggggcctagagggagtcacgcatctgtcccactgccccagcgaggagggggctgcagtacctggcagtccacactggggatgaggcctgggtgtctggagctcagactagacaggccacccagcaggattgagggtcagcaacagcttggtttcaccagccttgagtgaccttgagtcactctgagcttctaacagagaacagtttggaggtgacgagctggatcatagagtttaagagaaagtaggtggtgggagtctcgccagaggcctgggcaggtcctgggggcagctatggtttgggaggccacagggcattgtggctttgggcggggctttcagaagcatggtgactcagctctggggaagtggctaaaataggctgcccaacgtggggcaggcactccccatagcctgccttgggcgggacacccccaccccaccccagaaaccacatcccactttcttggcagggagagggaaaatggatcacagctcacagccctccctagctctcctgagcctccggaggaacagattcctctaccctcagcccactgaccacggaaccttcctttaaggtgggaacgaggagccctccccagaaggtcaggcccctgcttgggtcacagcaaccacacctttagttcagccctgttcctgagactacggaagaccacccttgcctggacccctcgcctatcctccctggccctcccagcttggccagcccagcagacccagagcagaaggacagacgggaccaacacttctcactccaagtgaccgggcagtggcctgtccctggcagcttggcttgaggcaggcgccagacctgagctctcatggggcagctaggcaggcctcgctctctgaagctgccctgcggttcaccccggtatacagggtacacaacatgcctcaatgcccactgccactgcctccgccactgctgctgggcagcatgccctctgcagggccttcccctagctgttctaaccaaccacccgatgccaggtccaggcaatgtggccgaatagcagagggcttttagtgcacgatgactttagttgtgacctggatcggctacaagaggctttgttccattactcatcatccagtcactcactccatgacttcctgcagacccactgatattcacaaactcttctaggccctggagatagagcagtgaaaatagcacgctgttttcccagggcacgtgtgtagtgtgagtgtggggggtgggggtggggaatggaggtgtaaacctataaataaaataaatggtatctcatattcctcagtataaggagggaaaggggtggtatgagtgggtgtgggagtcagggggtctgggggaggcccctcttgaggaaggagcatcatgagttgagaaccaaatgatgagaaggaaccagccgggtcagaagcgacccaggcagagggaacggcgcgtgcaaacgccggggtataggaacaggcttgtggcatttatggaatagaataaaaatccatgcagccagggcccaggttacatagagccctccctaccaggccacataaagagttctgttttgtttttagtttttattacaggcacctgccatcatgcccagttaatttttgaattttttggagagaccaggtttcaccatgttggctaggctggtcctgaactcctgacttcaggtgatctgcccgcctcggcctcccaaagtgctgggattacaggagccactgctcctggccgatttttttatgtttttagagatggggtttcaccacgtcggccaggctggtctcgaactcctggcatcaagcaatccacccgccttggcctcccaaagttctggcattacaggcatgagccaccgcacccagcccaggtaaggagtttggaggtcattataggtgtacaaggaaaccggcggctgtttgtaagcaggcgagtgattcaatctgtgtatctggaagctcccggaggtcctggcattggaggaatgaaggaggggagctggaattcagtcaggaggctgttgcagaaatgcaggtcaaagaggatggagaccaggatgtgggtctggcgaagggggacacagtgggagacatttaggccatgttttggaggtagagacacccgggattgtggagggcccagaccagggaggagagaaaagacaggatcaaatgggactccaggccttccaggggcagcctctggtcctggccatcctttcccaggttttgcctggcaggccacggccccttctcacaggaggggctgacatcctacccctaggcggaacttcactttgccgaaacacaggtggcattctgctacacaaggcttgtcagatggaacagcacgctggagggggttgtgcaagaggctcactgggacatgggccacaactctaagaggtgagggactctggctttagtcaccagagaaaaatccagtactttctggaacactcaccagccttaccctgcaaagataggaaagcacagggaaggcggaagactgtgtttcattcaaactgtggcagggctgagggcagctaagtgaatgggcgagaacagtgaccgcttagatacacgtggttacatgttccaggcaggacttcaatgccgactgtgttgtgattttagctgactttagtattcttggggatcttttaactccttcatgtgccctgctcaaaagcccttgcatctggaagtgtgctgcgtgcgcaaggaggttaaggctcactgctgtaatattctgagcctaagtaaccacaatcaaaaaccaaacacaaggccgggcgtggtggctcacacctgtaatcccagcactttgggaggctgaggcgggtggatctcctgaggtcaggagttcgagaccagcctggccaacatggtgaaaccccatctccactaaaaacacagaaatcagccaggcatggtggtgtgcacctgtagtcccagttattcaggaggctgaggcagggagaatcgcttgaacccaggaggtggaggttgcagtgagctgagatcgcgccactgcattccagcctgggtgacagagcaagattctgtctcaaaaaaaaacaaacaaagaaacaaaaaaacaaacccaggatgggaacatgaaatgtcaccatcaggactcctgtaccatttatgtatctgtgtcaaatatctccttaaaatacctgggtgtggagggatcatactttcaagatggaaagaccaaattaagggacttgccctaggtcatggattgaagccagagtttaattcccaccccagggctccattcacttaaacagcaatgtactatcaaaagtagggggcatcacaggacaaacactgaatatgtaatttgtgtatatacatatatgtgtatatatctacacacatatatatttttataggttatattcatgtctattgtcattccacgcattagtaagttttagtttacacacacacaccacacacacacacgcatgtgcacaagttttggtgtgttctttctaaatcccagtggattttctttttctttcttttttttgagacagagtttcgctcttgttgcccatgctggaatgtaatggtgcactcttggctcactgtacctccacctcccagattcaggcaattctcctgccttagcctcctgagtagctgggattacaggcacctgctaccacacccggctaatttttgtattttttttagtagagacggggttccaccatgttggccaagttggtctcaaactcctgacctcaggggatccacctgcctcggcctcccaaagtgctgggattacaggcttgagccattgcgcctggccccagtggattttcttatgtactccttggggtgctaaaatgcagcacccactgtgtcacatgactcccactgagattgagagatggtagacatctgggagaggatccaacccagtggtcttgattaggctgttgggaccaggagaggtgacttgccaaaggccacagaactcacaagggagccgggcggtgctggagcccaagtctcttgactcccaccccaaagatcttccccagataacacctcaatgggctcaccgccaggcactaggacaaccttctgatgtttgctaccatcttgcccaaattaagagctgggaaagagaagagggaaggaccttcctcccactgagcaattggtactaggtgccaccaggcagggggaacattacaaaactctgatccaagagctgctcagagtcaaaatggtcccagggtggggtggtcttgcggtacatgaaactccagcaaaatttcttcaaataatggctttaaaataaatgatggttttggccaggtgtggtggctcatgcctgtaatcccagcactttgggaggctgaggtaggtggatcacctgaggtcaggagtttgagaccagcctggccaacatggtgaaaccccatctcaactaataatacaaagaaattagccaggcatggtggcgggtgcctgtaatcccagctactagggaggctgaggcaggagaactgcttgaacctgggaggcagaggttgcagcacactgagatcatgccattgcactccagcccaggcgacaagagtgaaactccatctccaaaaaaaaaaaaaaaagaatgatggttttaaaatgaatatgattcagtttcctcaaataatggctttaaaatgaatgtgatttaaatgaatatgatttacctcctagaacttaaccctgtggaactatttcaaaggcgaaaaaagtcacacacgtatttgttgaagccttattcataatagcgaaagactggagacaggctagtcgcagtggctcacgcctgtaatcccagcactttgggaggccgaggcgggtggaccacgacgtcaggagtttgagaccagcctgaccaatatggcgaaaccctgtctctactaaaaatacaaaaaaaaaaaaaattaaaaaatacataaaaaaataaaattagctgggcctggtggtgtgcgcctgtaatcccagctactcaggaggctgaggcaggagaatggcttgaacctgggaggcagaggttgcagtgagccgagatcacgccattgcactccagcctgggcaacagagggagactccatctcaaaaaaaaaaaaaaaaaaagactggagacagacagcctaatgcccagtgatggaggaatggaatggctaagaaagctgggagccattaactcagagcaccattcagcagtcatggaaagtgggaactatgaagaccatagacaacatggaccaaatgtttaccaaatggcattaaatggaagtgcaaacaaaaggcagaacagaggccaaggcgaaggtcaggagtgcagtaccagcctggccaacttgttgaaaccccgtctctacttttaaaaaaatacacggctgggcacggtggctcacgcctgtaatcccagcactttgggaggccgaggagggtggatcacaaggtcaggagatagagaccatcctggctaacatggtgaaaccccatctctactaaaatacaaaaaattagccaggcgcggtgaggggggcctgtagtcccagctactcgggaggctgaggcaggagaatggcgtgaacccgggaggcggagcttgcagtgagccgagatagcgccactgcagtctggcctgggcgaaagagcaagactccgtctcaaaaaaaaaaaaaaaaaaaaaaaatacacaaggccaagcgccgtggctcacacctgtaatcccagcactttgggaggccgaggtgggcagatcacccgaggtcaggagttcaagaccagcctggccaacatggtgaaaccccatctctactaaaaatacaaaaattagccaggtgtggtggcaggcgcctgtaatcccagctacttgggaggcggaggcaggagaatcacttgaacccgggaggcggaggttgctgtgagccaaggtcgcgccattgcactccagcctgggggacaagagcaagacttcgtctccaaaaaaaaaaaaaaacacacacacacaaattagccaggtgttgtggcgcgtgcctgtaatcccagctacacgggaggctgaggcaggagaatctcttgaacccgggaggcggaggttgcagtgagctgagatcacgccattgcactccagcttgggcaatagagtgagactctgtctcaaaaaaaataaataaaaatttaaaataaatagaaaaacaggcagaacatatacttgtttatgtatagtggttacaactctacacaaatatgcatctgtgaataaagactaaaagggcacatggagaaattaagaagttatgttagccttgagaggaaaacagcctctttttctttttgtttatttatttatttatttatttttgagatggagttttgctctatcgcccaggctggagtgtagtggcaccatctcagctcactgcaacctccaactcctaggttcaagcaattctcctgcctcagcctcccaagtagctgggattacaggtgcacaccatgacggccagttaatttttatattttcagtaaagacggggtttccccatgttgaccaggctggtcttgaactcctgacctcaagcaatccacccgcctcagcctcccaaagtgctgggattacaggtgtgagccaccgcacctggcctttttctttttaaaacaaacaaacaaacaacaacagcgaaaaaaaaaaaaaaacccaaagtatcaaaggcttaaagaaaaagcattcatttcaaaaccagcttaagactatctagttctctgggttcggcagccacatcccagcataagatgccaactgaggactgagtgagaactggtctccatccgtactctgcctctcttgcgtgaaaatctcccactgatgtctgttctctctcttcctccctcaaaatcacccccaagccagacacgtttattaggtccttgttttattctaagttgcctgggcggaggaagtgggcaagctttattaacctgacatcagggggcacagggagatcgggaccctctcaaaaaacagaactcgctctccaacagctgcttcctgatgcttaagcctccccagctgagcaggagatgagcgataaggatcactcccaccctaccggagatcggcctatttccagtgacactgaagctccaagctggaggccagcctcccacataacagtgggatcctctcagagagatcctgtgcaggtgaaggttttacttctatagctctagcttggctagactgtcactacaagggagcagagaaaacaagaaggggtcacatgagggcaaccagcacccaggtgctccagccaccactgaccgccaagctgtgtgcagaattagatcatccctgggggtagatctctaatggggaaggcactaaagtgagtcttagctcaagagtcagagaaacaggctccctaatcccctcctaccccatccctccagtacacctcctcattcaacagttctcattcactgggctccgctgcgtgccaagcactgtactgaggacaacatacatttatgcccttgaaactcaaagcaaactcgcaaggaggctgccctgattgcccctattttaaagaacgagaaacggagactcagacagagtgaattattttactcactctcacatctcacagctttttttttttttgagacacggcattgctgtcacccaggctggagtgtagtggtgctatcatggctcactgcagcctcaacttcccgggctgaagtgatcctccccggcctcagtctcccaagtagctggggccacaggtgggcaccaccatgcctggtttattaaaaataaatacataggctgggtgcagtggctcacgcctgtaatcccagcactttgggaggctgaggcgggcagatcacgaggtcaggagatcgaggccatcctggctaacacggtgaaaccctgtctctactaaaaatatttaaaaaaaaaaattagccaggcgtggtggtgggcgcctgtagtcccagctactcgggaggttgaggcaggaaaatggcgtgaacccgggaggcggagcttgcagtgagccgagatcatgccactgcactccagcctgggtgacagagcgagactccgtcctaaaaaaaaaaaaaatacacacacacacacacacacacacacacacacacatttttagtagagatggcatctcgctttgttgcccaggctgctcttgaactcctagcttcaagcaatcttcctgcttcagcctcccaaagtgtgggattacaagcacgaaccgttgcaccccacacccagcctctcacaacttctaagtggttatttgagcccatttctggcagaccttggagcatgtgattttccatatgaggtgatgctgcctgacctgtgcaggtgtctgcagctgaggatgtacatgtggagcagggtggggtaggaagggtctgggagccggttaacctaagactcttggagctaagactcacattactgcctcccccattaaagctctatccccaggcatggctgcatttgaaacctcctgaaaggagatttctcttacccaggagcccattcccacttcctgctctcaggaacctcccaatgttctggtgttctgggaggtgagggatgggaaggatcaccctgaagcacaagccaggactctgccggcatagtcaggagtagatcagcacaaggcctcacttctagtgtgttcctgtctgctctgtccaaactccatcttgtgttccttggttattccagctcccaggaagaaaaaccagaaccgtgacccaacaccacttgccccaccctcactgcccgcgtgccaatccatgccaggatcattgatgcaaaggtgccactgcacagccaccctggggcagatcccatttcctggagatgaacatcctctactttgatggccccttcctgaagaaagggcaaggtcccagatttcatgccatgtcttccccccaccacccccagcctccaagctacaagacagtgcccattccccaggtatccctaccgggtgtgggtcagggagggaggagtctactgggaaggggggtgaatcagggagagcagggatcatagagtgacctggacaaggaggaaagcaatagtgcacaccagaacctcccagctacttccactttatgccttctctctatgagttaataataattgaccctccactgtccaccagccacttctggcttctgagcacttgacatgtggccagcatggaataataaacactggagactgggagggtgggaacccagtgagggatgagaagttacttaatgggtacaatgtacacgattgggtgatggttacactacaagcccagacttcacactacacaatatacccatgtaacaaaactatacttgcactccttatatttatacacataaaaataaacacacaaaaataaaaaataggcagggcgcggtggctcacccctgtaatcccagcactctgggaggctgagtcaggcagatcacctgaggtcaggtgttcgaaaccagaccggccagcatggtgaaaccccatctctattaaaatacaaaatcagccaggcatggtggcgtgcgcctgtaatcccagctacttgggaggctgaggcaggaagtattgcttcaacccgggaggcagagtttgcggtgagcagagatcacgccattgcactccagcctgggcaaaaaagagtgaaactccgtctcaaaaaaattaaaaaaaaaaaaaaaaatctggcaagtccaaatggatatgtgcacaagtggaaaatacacactggacttctaagatttagtataaaaaaagaggatgtataaaatatctcattaatattttagactgatgtgttaaaatgatattctgaatatagtgagtcaaaatgtaccatttcctcttacttgttaaaatgtaactattaaaatataaattatgtatggcacttgcctaagacttctattggagagcaataatttagacattttcccccttattacacaagcagcatgttcccttgtagatggataaataaagccaaccattgttcacagctgggtcaaaatatttacatgttaacaatttatgctacattgttttaaattaaatcttaatatctaatttttacatccaatcagggattgaatggctaggttgtttccattttcagttgaaactctgtaaggtcctttcaggcaattatgtgcataaccttaactatttccagatgatacattcttgtgagtctgtcccccaggctggagtgcagtggtgtatctcagctcactgcaaccttccactcctgggttcaagcaattcttgtgcttcagcctcccaagtggcaggggctacaggcacacgccaccatgcccagcttttttttttttttttttgaggccaagtctgtattgccgagactggagtgcagtggtatcatctcagctcactgcaacctctgcctccagggttcaagcgattcttgtggctcagcgtccaggcgtgcgccaccatgcccagctaatttttgcatttttagtagagatggggtttcaccatgttggccaggctggtcttcaactcttgaccttaggtgatccacccacctcggcctcccaaagtgctgggattacaggcgtgagccaccatgccctgcctgcctggctaatttttgtatttttagtagagacagggtttcactgtgttggccaggctggtcttgaactcctgacctcaggtgatccaccagccttggcctcccaaagtgctaggattacaggtgtgagctactgcacccggccagcaggctacctttttttccccctaacatatttaatggccaccccaccaagcttatactaccttacaggctctaagcaactatatgattgaatcttttgggctttggaagtggataagctcatcatctgcaactaataataattttgcctcctccattcctcattatctcgttatatttgttacactgccaatataatgttgaataataccactgacatgaaacatctctctttctggcacttacagtgatatcctaaacctccggcatctaatccagcagccacaagccacataaggctactgagtacttaacatgtggttagtgtgattaaggagctgaatttttaattttttttttttgagacagggtctcactctgttaaccaggctcaagtacagtggcacaattacagctcattgtagcctcaacgtcctaggctcaagcaatccttccacctcagtcccgagtagctgggactacaggtgtgcaccaccatgttgcctagccaagtcttaaaattcctagcctcaagtgtaatctcaaagtgctgggattacagatacgagccaccacacgtggccagaattttaaattttaattattttacatttaaaaattgacaattggccgggcgcggtggctcaagcctgtaatcctagcactttgggaggccgaggcgggcggatcacgaggtcaggagttcgagactatcctggccaacatggtgaaaccccgtctctactaaaaatacaaaaaaaattagctgggcatggtggcgggcacctgtagtcccagctactcgggaggctgaggcaggagaatggcgtgaacccgggaggcagagcttgcagtgagccgagatggcgccactgcactccagcctgggggacagcatcagactccgtctcaaaaaaaaaaagataattggccaggcgcggtggctcacgcctgtaatcccagaactttgggaggctgaggcgggcggatcacctgaggttgggagttcgagaccagcctgaccaacatggagaaaccccgtctctactaaaaatacaaaattagctgggcgtggtggcgcatgcctgtaatcctagctactcggaaggctgaggcaggagaatggcttgaacccagaaagcagaggttgcggtgagccgagatcgcacccttacactccagccttggcaacaagagtgaaactccatctcaaaaacaaacaaacaaacaaacaaaaactgataattggccgggcacggtggctcacgcctgtaatcccagcactttgggaggccgaggagtatggatcacttgaagtcaggggttcaaccccagcctggccaacatggtgagaccctgtctctactaaaaatacaaaaattagcctggcgtggtggtgggtacctgtaatgccagctacttgggaggctgagataggagaatcgcttgaacccaggaggtggaggttgcagtgagatgagatcatgcctctgcactccagcctgggcaacagagcaagactctgtctccaaaaaaaaaaaaaaaaaaattaattcccccttcctttagttttaaaaacatggctcctagaaagcataaaattccatatgtgactagcgtcacattcctattgacagcatcatcctagggctagtcccactgatcatcctgctcactgtgatttgaatatcacacaagtattctccaccaccttaaggaatgcacaattcttacagtttatgggaaaatgatgccaataactcactcagccaggctgagttatgggaaaacacactacggcttaaaataatttaccctttaattgctggaagatatagcataaggagtctagtctagtttaaatggtgactcattatcaagaacactccggaataacatctctccatgtggatcccaacagatagcaagactgtgtgctgaggaacccactctaaggaaatactattctagaccctacctaacctcaggggtagacccctccccagactctgcagtaactattcctgggccacatgtcatggagaaaatacgagaaagaactaagatttgttgagctttttactctgcaccaggcattgtgttaggtgatttattttgattaaactgtctcttttcttcttcttcttttttttttttttcctgagagagggtcttgctttgtccctcaggctggagtacactgtagcagtgcaatcaaagctcaccgtaacctcaaacttctgggctcaagccatcctcctacctctgcttcccaaagtgctgggacgataaactttgtagtcatacacggtcccaagcatttgaaaaactttatctcatgtattcttcccaacaatcccatggagttatcactatcatccccagctcacagataagagcaccgagacttagaggggcacgtgctctactcaagtcacacacggttggttaggagagagagacaagaatccagatgtgctggactctgggttttttccactccaccataaggaacatcggggtggggggggcgggtggtgcgagggggacagtgcatcataagtgtccctggggctcaggcctgggagggctgctcaaggctctggatgcatgagtacacacaggatacgcagttgtgcacacaatttcaggttaacatctcctgagtctgagcacctcattccccaccactccagggaacttatagattaatcctggaaaatacaggctacagcccaacaccccaggtccatccaggggagcctcctgctccttgtgggctgggaaccagctgccctgcttgtctccttcatcttcgttcctgcacccacctcatccttatcctcatccccatcccagaaccacaggcttcaggccaggggagaagcaggtcagcaggaggtgaaggggaaaccttccctcacctcctgggaattagaacagcacagagaagggaagaaaaaggagccaagactagggagtgaccggaagcaacaacggaggagtcaagacgaagaggagccagtgactcaaggacatccggcaacttcacttgattacagggcccttcctggaaatgtgtgcttcccggagccaccacccgaagccagccaccagcagagggaccatctgggccaggcaggatggatgcctggtggggggccccactgcccccatacaggctgggccctcctcctctaggagtggtgctactactgggcagcagggtgcctccctcctgctcgggagtgatcgcagaggaaagtgccgcgcttgaaatcagatctgccaggccttgtttggtttcactttgccgctcctaagagccgggtgctcagctaagaactgggaatttcatggccaccttggggtctccaggagactggcagatctaaactccctccagagcagacaggctaatcttgcatcttggccctgccggaagttggggacaaagagccccactccctaggtcacaaggtggcctgccacgtgggtcaagttatttgtgcctcagtttcctcattagctctcagaacaattgataacattacataactcccaagtgctgtgctcgggtgagcacagttccatgtgtgctataaagatgatgctgtcacacccagtgacactccagccactgtcacttcgcaaacttcatagagaacagccacctgagagcacctaattcaaaagtctgtacagtgaaacgtgggctgagacaatgggttgacccttttcaaagtcctgggggttcccaggattatctgatgcagggggaagggtcccccaagctgctgaagcccaggtacagattctgccctccctctgtagtctctgccagcagtcgggggcaggaaaccctcggatctggtttctttcctgatctgagttccctcatcccgtcaccttttaacctttaatgatgccagaagaaggagcctggcttctctcagacaagatggtgaggtggaggtgggaaaagagaagctcctccattccttcctaggataagggtaaaagtaactcaggaatttgccagaccccgggtgctactagcaacaaataatgcacaggccaggcaccgtggctcatgcctgaaatctcagcacattgggaggcagaggcagaagcaggaggatcgcttgagcccaggagcttgagaccagcctgggcagcacagtgagaccctgtctctaaaaaaaaaaaaaaaaattaaattagccaggcatggcggcacacgtctatagtctcagctactcaaggctgaggtgggaggatctcttgagcccaggagtttgaggctgcagtgagctgtgattgcaccactgcactccagcctggccaacacagcaaaaagcctgtctcaaaacaaaaaaataatgcacaaaacttcaatatgatcaacccccaataaaatataatctgatcttttggacctaaccagattctccttagaggtaaccacaaatcgtactgcgagcccctaggctctttttgggctctcttgggctctctactccttgtaccacttgacaaagccttaagcccaattccaggacttgaggggaacaggtccctttctgatgcttcagggttggaggcaacagtgtaaggaaataagaaggttgcactgagtgaagacccgaggtagagaggaaggacaggcaggaaagagaagccagcacacagaacctggctttgttggcacacttggagagattcaaagctggggtctccagaccaagttcagtgactgccagaactgcaggtgtctgggcaaaagaagaacccagagtctcatgctgggaggtggaggctgccccagacaacctctgctaccgtgatggccaaggcagaagatggtggctgaagcagctctggctgagcacagacatccagggatccttcttgcctggcactgtggtttttccagatgccttcagctccatctttggggtgaaggggaaacaccaggtgtgcagagcagtttcttacaggtggggaactgtaagccttcattaatgaccacaccctaaactgtgctcacctgaatcccaaaagagagacccttcctcagcttgagtggagacagccagttcccctgttcctggcaagggagggctttggatgccagcactgccatcctggcacagagcccagagctgcaagctggcagtgcctgggggagactccaatgtaagttagttggaaggaagcccaagtctcctcaagaaggcgtattttaagctggagctttcggggcacggtgagcgggaatgtgggagactaatgtctgaatttttctttctttctttttttttttttttttttagacggagtctcgctctgtcacccaggctagaatgcagtggcgcgatctcggctcactgcaagctccgcctcccgggttcacaccattctcctgcctcagcctcccaagtagctgggactacaggcgcccaccaccaagcctagctaattttttgtactttttagtagagacagggtttcactgtgttagtcaggatggtctcgatctcctgacctcctgatccacccgccttggcctcccaaagtgctgggattacaggtgtgagccaccacgcctggccctgaatttctctcttttttttttttttttttttgagatggagtctcactctatcgcccatgctggagtacagcaacctccacctcttgggttcaagcgattcttgtgtctcagcttccccagtagctgggattataggtgcacgccaccatgcccggctaatttttgtatttttagtagagacggggtttcaccatattggccaggctgatctcaaactcctgacctcaagtgatctgcccgccttggcctccccaagtgctgagattacaggcgtgagccactgtgcccggccctaatgtctgaatttccttcccaacgcactcaagcaaaaagggctgtgtccagtgccacatgcgggctccttccagcactaccatccagttccctgccgagagagggcacgcatgggcttggccttcctagagcaccccagaagcactggctggagttggccttcaggacactctgccggatgacccctcaaagtgtccccagctccagaatttggttcttttcctcacggtcgggaaaaatcctccagtacgtaggtcagaagagctacgcagagctcaggtcagctctgtttccagggcgagattgctcaacccttctccctccgcccacaggccttatctctggcatcaacccagctccccattcctccaagggacggactcctccctccccccacagggacaaactcctctgagtctgcagaaccagaatgagaacacagaaggctggacttactgctaaccaagtgcaaccctgaccactctgacttctgacttcttcacttcgaacccaatccaaacgtaggggcgtggggtgggggagagtgaaagggagaggccaacatcaaacaccttttggccacacctgcgcacagacagtccgggccgcagaaatcaatcagtcactccaaaggggtggaagccctgggccactgccaacccaaggcccttctggaaaagctctggacttgttaagaagggttggccagggctgggtgcagtggtttacgcctgtaatcccggctcttggggaggccgaggtgggtggattgcctgagttcaggagttcgcgaccggcctgggcaacacagtgaaaccctgtttctactaaaatacaaaaaaaaattagccgggcgtggtggcatgcacctataatcccagctactgcagaggctgaggcaggagaattgcttgaacccgggaggtggaggatgcagtgagccaagattgtgccactgcactccagcctgggcaacagagcaaagctctgtctccaaaaaaaaaaaaaaaaaaaagggttggccaggtgcagtggctcatacctgtatgcccagcactttgagaggccgaggtgggggaagatcccttgagctcaggagttcaagaccagcctgggcaacatggtgaaaccccacctctacaaaaaatacaaaaaatggctgggcgtggtggtgggcgccagtagtcccagctactcaggaggctgaagtgggaggatagcttgagcccaggaggtccagcctgcagtgagccttgactatgacgctgcaccacaacctgggtgacagagcaagacctggtctcaaaaaattaataaataaaataaaaattatttttaaaatcaaaagactggtgtaagattcctctcccaggtcaacactcactcccctgacctttatacatgagacctccctttgcttctgactccttggtctctggttctgtgaggtgctgtcgggttccagaggcagcagcacagtggaggcagggtacagaggatggggacaagcacggtgggtgggcaagggaaagagagaaacgaggggaaaagagaagaggaatccaaaaagagagaggcagaaaccccagaaaatggagaatcattcacagcacaggcctaggctgtacagcagagcaggagcaagctgccctctgtgtgcagggaccctaggacttcagggagatttcagaggggaggcgctgagactcaccccagaaccaccgcccatatgatcacagcgggcccctcctagtccctgcaggggtccaccaggatgcctgggaatccacttgggatctccccaaattcactgaacaccccttgtgggaaggagcagctgtcttcaaggagtggagaggcaaagtccaagttcagaggagataagccaccccactaatcagtcagtcacatgtgcagctcacacagggcagttgatgagagcaggaaccggcagggcacccccgcattcagtaggcactggcttctcagcagagatagagcctcaggagatcctggtggatgccctgttattgccccaggagcccctggggctgccaggggctctcttagggcctggctcagtcccagccaactcccgatttctgggagaaatcagaaatccgcagctcagcaatcccttcctttgtggcctgttctttgttctcttaaaattcagtccaccctgctggtggtccctcctccaccctagcctcagaagcgggcgggggctgagggagttattggaaacccagactgccaaagaagtcgccttgcaggaggcccctgtcaccggcccctcattatttacactcgctggatgggacatttctctggtacagatggctgctggggttcggacgagagagagattttccctccagcaccctggaccctcaggggagggcagggggcttcgcagcgacgggggctcccaaggactccacccggatccagctgctcagctatctgggcaaacagtgggcaccgggcacacagtaagggatgtgggagccggtcagattgcaaggggtgggagtcgtggagagagagaagttccagaggcaacgagaaaagaaaaggcattgtatttcccctccattctcccagggagaaaaagaaaacttccaaagccgaggccgcagtcactgggaaaacacagggaacctggtttgagttagcagcgagcacccctcccccagtcacacacacacacacacacacacacacacacacacacacacacacacacacgcacttcagtcctctcccaggaagctggctcagcctcagccccggctcccgcccagctctccagccctcccggccggggcactcaccggctgacgggatccccgcgggcaggatggctcctgggggacgcgccgggggcagggggcagttttgtaaccccggctgggggcgctccggagagggggcggggccagggacggccgatccgcgcgcacccgccccaagcgggcgattaaatcattaaccgaccgctcccgcctgcgatcccgctgagcgcgctgagctcggggcgcactagcccaggagcggccgtctccccggctccaagggggcgggtggctcgactgccctccccccgcaccccgccaggaggcgcctcggcctcccgggcttccgagggagcgggcggggcgggagcctggcgggggagggaagggttcgcggggcgggagtaggggaaaggaggaccatttgttccttcggccattcccttccagacagctccttccctctggcttcccggccgggtgacattgggtggcgtgtgctgcagtgtgtgtacgagagcgagatgtgtacacgcctctgcccgtacaggcggagaattcggttcttattcatggagaactccgggcgcacacacgcccccctcgcggagatcgcgggccgcgcgccgccgattgctgcgctcctgcccacaccgacacacaccccattcctgggaagggggaggccctttaaaaccggcccccaaccccctcagcggcacccttggccagggccgggagttccagcgtggagagaggaaatggagtcccggcaacgctgcgcccggctccctgccacctcctcctccacacatcccgctctgccaggacactaggtgcgcagcttagggtcccaggcaccgcggtgggcgcggtgaaaagcgcgagcgccgagaagtgggggctccgcgcccttctccccgcgccgcggcctcgcatccccagcttcgatcctctctgccccacagggggactcgagacccccaagcccacccagggcacccagcgcgaaggcggctaccacagacagaggcggttgcccgtcgcctacctcggtccccggagacccgagctctgggccggctgcgctgtccccttcgtgggctccgcgcggcggaggggctggcggcccctgtcagcgccggcgtttgtttccctctggctctcgggctttcagggctgggagcctccaggacactccccttccaggctccgcccgcgcccgccccgcgcaaccctccccgcgcacccctctgcgctgatgtcacggcgccgcagcagccaatggccgtcgggaacctctgcccgactgctcggcctcctcggttcaaactgaaagcctgagactttcccaactccgtatggggcagcctgggcccgcccggcttccgggagacactcccgccccagcctgcgctccggccgcgaacccccactggggcccccagggccaggggcgcgtctccctccgggggcctggcgcgaggctcttttgaggctcttccccattcgagccggggcaagaaaccaagaactccagcccgggtggcgttcctcgttcctgctccctcccggacctgctaaccacctggctgcagtactgtcgggagatggggcaggagggctggcgccaccagcttcgtgggtgccatcccagactctcgctgtaaacgagggagcggggaggagccggccagccccgaggccaggcttggactgggcgtcagaaatgtttctacagggtgacagcccttgagctccccgcatccccgtctgtgcctttgcctcctaagtatcagctgaggctaaatttgcaccaggtgaacgtcaaggaggatcaactcctgagtcccagagcctgaatccaagtcccaggccttggactctattctttttagaggaatagtttcagttgaaatgatcattatcaaggtagaatgccagctgcgaagtagtcaactaaagtggacaaggcgcaaagtgaaaagttcccttgcctctagctgaaccccaccctcggtttttaaaggaagtgagggtgaaggccccagactttccccatggctgcgaggtccctaagccctcaggaacattctgctttctggggacagcacatttccgtttccctctgcagtgcgacagcaaccagctcttgagagctaatggtttggccactccatcctgctgtgaaaattaagttctgggctgggcgcagtggctcatgcctgtaatcctagcattttgggaggccaaggcaggtggggggtcacttgaggtcagaagtttgagaccagcctggccaacatggcgaaaccccatctctaccaaaaatacaaaaattagtcgggcatggtggtgggcgcctgtaatcccagctacccaggaggctgaggcgggacaatcgcttgaacctgggaggtggaggttgcagtgagccgagatcgcgctattgcactctagcctgggtgacagaggtagactccatctcaaaaaaaaaaataaatgaataataagtaaaatcaaattctgaactggacatctggagggaaaggtagggtttggagccacttgggaggcagacactgtggattcaaaccctggcggggttatcatggatgtaaaccaaaaagtgactaaggcagatctcaatcaaatagaggtttagttagccaaggttgaggatccaccggggaaaaatcaccttttttccaaaaaggttttgggaacttctgtatttaaaagagaaaaagcaagcaggaaaggaaaagaagagggagagagggaggaaaggcattgaggtcacaagcgtgtgaggctctgatttagtgtctgtaagtctacattttacatgtgaaagggaatagaagaaaaagtcaatgatgcattgtctcctactcagtacgtctaaggggagcaaaggaaaccctgtgtcaacagggttgtgaaactgcagctatctgggaacaaaaggaaagcagcttctgtggtttccaagcttaacgtcccccccagccccgccccttttttttttttggagacagggtcttgctctgttgcccaggctggagtgcagtgctgcaatcgtagctcactatagccttggcctcctgggctcaagcgatcctcccacctcaccctcctgagtagctgagactacaggtgtgcgccaccatgcccagctacatattttgtactttttcttttgtagagacagggttctgtcatgttgcccaggctggtctcaaactcctgagctcaagcaatccacccacctcaacctccaaaagtgctgggattaaactttccctttgacatagtgaatttggggtcccgagattctattccctttcacatggggaagtcgctaattcccacctctgacccttagctagcctggctgtccttatgtgtccaaagagcacaggacccctctgctagcctcgtctggagggtgtaaagaggaatgagatatcaggtgtgaaagcgctttatgactagaaagcaaccagaatggaggtgattgctgtcatcatgacctagtgccaaaggtgtcctcaaaagaagtaggagctgcaacaggactgtgggtaaggctcgctggatagaggtttggagacgcctctggattggaattctagctctgccatttatgagctgacaagttatccaccagcttccccatctgtaaagtgagaacagcaatctctaccttcccctattggggtgaatattaaaagagatcacttaggctgggcgcggtggctcatgcctgtaatcccactgctttgggaggctgaagccagtggatcgcttgagcccaggagttcaagagaaacctggcaacctggcgaaaccccatctctacaaaagtatacaaaaatcagcaaggtgtggtggtgcatgcctgtagtcccagctatttgggaggctgagatgggagaatccacttgagcctgcaggttgaggctgcagtaagccaagatcatgccactgcattctagcctgggtaacagagggagaccctgtctcaaaaaacaaacaaacaaacaaacaaaggcacctggccatttgctgggcatatgcaggccctcagtgggtctccttctaccacattgcttccaggtggaagtcctccctggttcctggcgttccaggacctctttctcctgaaatcatagcttaagttaaaaacaaaaacaaaaaaaaaacgtttcttattttctctgagacatctccctctccccatctctttccttccattttaaatgaagtatttcggttttcttagggctagctgttagtaatctgttttccttttcccaattatcatccatatctattaagcacacctccgggacaaagtctttaggtccctttgtaattctgctccttacccaaattcaggctccttccacaaacatttaacaacagtggaggcttgcctttggggacaaagacaacgaagcccagtccctgccctcaggacgcctagagtagaaacaaactgcttcagggaggggctccgtagatgcttctagactgcatcctagccctctgagggaagatgtgattagaagatcattttctttgatggtgggaatcccagacctgtggatttctctccgaaggatccactgaagcaagttttgctccaacccgttaggctagagctgtctatgagtaaccagaggaaattaacaaaataaaaaatctgaggcttgaatacatacctacttgaaatttctggcaagctctaagcccctgactttggagagggatttgaggtcttaactgcacccttggtgtaacttgacctgtaagcctttaggcctaggcgtgtgtctctgcctgtctggggccgctggggcctgcctgcctctgggacttgggcatgcatgatccttgcagcttcatggacttgcccctccctaatatccacccccaacccccaacacatattaggtagatgcaaaagttattgcggtttttgccattactttcaatggcaaaaaccgcaattacttttttgcaccaacataccacatcccagtgtttgttaacatggagttctgggcattttagttcatgttattttgtcccagctctaagaggttaattagtcctatttcctttttttttttttttttttttttttgagacggagtctcgctctgttgcccaggctggagtgcagtggcatgatctcggctcactgcaagctctgcctcccaggttcacgccattctcctgcctcggcctcctgagtagctgggactacaggcgcccgccaccacgcccgggtaattctttgtatttttagtagagacgggatttcaccacgttagccaggatggtctcgatctcctgacctcgtgatttgcccgcctcggcctcccgaagtgcaagatcacaggcgtgagccaccgcgcccggccaatttgtcctatttccttggaggggctggaagttccactcattccagtctggtgtttgtcctaaagtatgactctgggcaggtcatttctcttcgtgaaataagctatctccccaagcaagaacactacaactttctatgtctattccccttttttttttttttttttttttttttttttaggattcttgctctgacgcccaggctgcagtgcagtccgcaatctcagttcactgcagcctccgcctcctgggttcaagcgattctcctgcctcagcctcctgagtagctgggattataggtgcccactaccaattagccaattcctggctaatttttttttttttttagtagaggcaggttttaccctgttggccaggctgatctcgaactcttgacttcaagtgatcttccctcctctgcctcccaaaggactgggattataggtgtgagccaccgtgcctggctttcaagtctattttgagccccccttcccctattgaggtgagacaagatggtcctggactgaacctcaaggtgccaccatggcttgatgtcagcacagtttgggtggagccttggtgatccaggtcaggagcccatcagctggggtggcctggcgctgggctgtccactcccatgcctgcaagagagaggctctttcacgccttgcttccccgttcttgggaaccacctggagccctttcatggggctggggcaacctgctgagcagctgggaaaatcctgaaaataccaaactactggcagagtgcctggggctccagacaagactcctccaccatggtggggaaaagtacctgcatctgggggctctttctgccccaggtttcaggggcataaccctgattttctgggggagttcacgcacatcagggggctggggcagccagtgcatgcctagagagtaaagcaatacgatttccccttggcctccctggggacagggtggtgttcagttcatgtctgaacctccagcgtgggttggcacacagtgcatttgctagacaaatgaatgagcagagttcacagcccacatccctcccttcttccatttgcaaccccagcctcaactaagctctgtgtggtcactttttccctgaaatgagctgtactggcccacagggtcacacatcgtcccagaacggcagctcccaagggttcacagcacaaattggcccaggaggtgagggaggccgctgtgtgtcagaggtcccctggcccagagagacgccgttcacaaggctgggggttctctggaggcaggaggtgaaaataggattgaactaggctcaaagatgggatgaggtgtgtgaaggggcagtagcagagcagaggggtcatgaaatttacaggaaatgagtccagatgtggggcttagaacacctgggttgtacttgttgtgtgaccttggaggagtcgtcttatcgctttgagtcacacctgtaaggggggcatggtaataattcaggccataggaggctatcagaagaatggaaggagataaggcgtgtgatcttgcttcctgaaaagtctaaaggaaggccctagctactattaggttgttactaagttgagctttagggttctgggtactgtggctccctccttccctctgcagggaaaagacagacagccaggcctccccacaccccactcaggaatctgtcactgtgcattgtcaggttattaacaggccactcctgaccactgagctgggacatttccaagaaagcaggagatgatattaaatttcttgttcatccagcagggagaaaagagtgggcaagaaagatacagcaaaagctctgggctgctgagaaaattagcagagaagtcaactaaagtcagtaaaacttgcaagcaggggccctgggaagaatgtttcctgtgacccccggatttctgaagcccagagcttcacccactgtgacccgtggcaaaaatgggggagcccaaccacgcctctgagcagaggattccacctggtgctccaaaggcctgagagtcctggttagaaacacgggccctagggccagatgatactggctttgaatctaaattgtcactgtgatctgagaagtcccttgagctcccccagggcttggtctcatttgcacaatggagactacaagagatcccactcatgctgatggcgtggggttggtggctaatgcaggtcagaactcatccccaagctaggaccacaccaaggtgtcactacttggatgctggctggtctcacagttaaaaggacctaagtttgggaggctgaggcgcgtggatcacttgaggtcaggagttggcgggcgcctgtaatctcaggtactagggagactgaggcaggagaatcgcttgaacctgggaggcggaagttgcagtgagacaagatcacaccactgcactccagcctgggtgacagagtgagaccctatctctgaaaaaataaataaataaagaaataggaccgaagttagactttctggagcaagcttcattctgacattcatccttgccacagaatggggccatccctgttagtgtttctgagaactgagctaacagaaaacaaaaattaacagcattatctgcaagaagcagtcctgggcttctgataaaggactcaggctctggtgggctcacccagaggggccccccttatgtcattgtctctggggaagggtgggcggggacccagctctgctggagaacagccggtgatagccagaagccctcagggtttctagagggatggaaagaaaagagactaggtgaagcaaagcacttctgtttgcatccagaaaaggcctctcccctgagagcccgggtcagtggcaaacgggacttgaataaggatcacttagaaaaggcagggccacttctagagtactttacttatcgagtactttactgtatgtaaagatttctgcatctcaaatctacaaagtggttgccattatgattcccattgcagataaaaaacagaaaaggccagatgcagtggctcacacctataatcccagcactttgggaggccgagacaagcagatcaattgaggtcaggagttcgagaccagcctggccaacagtgaacccccgtctctactaaaaatacaaaaattagccgggtgtggtggcacatgcctataatcccaggtacttgggaggttgagacaggagaatcacttgaacccgggaggtggaggttgcagtgagccaagatcgcgccactgcactccagcctgggcgacagagcgagactctatctcaaaaacaaaaaaacaaacagaaaagactgagtaatttgctcaggattatgcagctagtgaggccagatcttgggttggaaacacgttgatggtgagagtccagccacagaaccatgagaaggtaggaaaggaagtttccagctgaaacagaaatgatcccgttactatactgagccgcagtgggcaagaggaggttgctaggggagactggcatgatcttcaccaagcagacaggcttctgtgtgcccaggaggagtctacattgtttcaaagagaacggactcaccctgcctgaaggcacctcttagcaagctatagtagtatctcaaatcgccacctgcccccatcaccctttgctccctgctcaagaccacatctaaaccaaaggccccgattaaatcccttcctagagctcagcacatggcccaggggtgaggattactagagctgatggcatcactcagcattctctccatcccaatgtgatgtgacacctctgcccagatgttcccagtgcttaaaggagcagccctctcaaatcagtaggttctggtatctgtaccttttgttgggggcactcccacctccttccttctctttttactgagctcccaaaatcccagacccttgggtaaacttctgatgcttctatacttctatttgaccatagggtctcactgcattttcccagccatcctgggcacagaaagggagactcttctagaagaaaatgggctttaagatacatgtgagatagggccagctctactataatttacaaaaatcataattaaatttttttactgtaattaaaaaaaaaactagccaggcatggtggcacatgcctatagtcccaattactggagagactgaggcaggagaatcgcttgaacctgggaggcggaggttccagtgagccaagatggtgccactgtactccagcctgggtgacagagcaagactctgtctcaaaaaaaaaaaaaaaaaaaaggagtgagaagggagaagggcctggcatctccgtgtcccttcttgtggggagagtgaggaaaaggtatgtatgaactggatggaactgtcaaagctgatcattgtggctatggagtttgttttctcttctccagctttcagtttcctgagtgttggcatgtgtgcatgtgtgtgtgtgtgtgtgtgtgtgcacgcacgcgcgtgtgtgtcctttggtcctgggaagcctttgattcataacaataactcatcctagtctgatgtcaaggctaatttatacttcccagcttgatggcttgaatgctgcagggcatgagttttctccactctccaacccctctgttacctctacaagccttttgctctccagaaagcagttgtatttgaaggcaaaagacatgttaggtcagctaggaatgaggagtcagggagcacattgccctgggcccagaccccagcccctgactggcatgtttttgagtagccagtgaaatcccggctgagttgtggcctgggagtcctccagcaaagcaaaacctggctcatccaaggtcaccaagaggcaacaaggacagagagatagggtgaggaggctcaggagcctcgtaattgaatctataataaactaattacatgcatgaaagtgtgtggaagagaatgtttctctcttttgtatgagcaaagaatttggctaatttaaggagaatgatttaatgttagggatcgcctaagccactctgttttcagaacagaaaataaaatccaaagatgtcaggtgaaggccgggcgcagtggctcatgcctgtaattccagcagtttgggagtccaaggcaggaggattgcttgagcccaggagtttgagaccagcctgagcaacacagtaagacctcgtctctacaaacaataataataagtattagccaagcgcggtggcgcatgtctgtggtcccagctactgaagaggctgagatgaggcgtgagatgcatgagcccaggcagtcgaggctgctatgagccatgactgtgccagtgcactccagcctgggcaacagagcaagactctgtctcaaaaaaagagacaagtcaagtgacttgttcaagggcacacagccagctactagaagaatctgggataagagacatgaactcccctaacccagggccagtgcttctgctacatgagtggttttcaaacatttatttttgtaagcagggggttccttccctctccttcccccgccaccttgcaagtgaaacatacatgacgtcaaacagatcaaggtggtcccactatgtggtgaagtggggtgagggttccagaaccccatctgctttgcctttttcgatgcagttcttggggtacctctgggaggtcctaagccttcaggaaactgaagactacagcactaaccctaacaataataagccctcaatacagtttccataagacctaggtattattctgaattttatatgtagtagctccttcaatttccagaaaccctgtgagacccccacaccagtggggctgcaggagttgtaagctttgcagaggtccctcctccacatgcgtgtcctgacaaacaacatctcttggaggccgggcacagtgactcacacctgtaatcccagcactttgggaggctgaggcgggcagatcacttaaggtcaggagttcaagaccagcctggccaacatggtgaaaccccatctctactaaaaatacaaaacttagctgggcctgatgccatgtgcctgtagtcccagctacctgggaggtcgaggtgggagaatcacttgaacctggtggcagaaattgcagtgagctgagattgcgccactgcactccagcctgggtgacagagtgagagtctgcctcaaaaaaaaaaaaaaaatcttttgacatctgggctcctgaaatggaatctttgctagtagagggtgactttttattcagatatcctgtcgcataaccctgcccttgaaccttacctcatctcctcccctttccttccctgttttttaattcaccgccacccctgatgtggctccaggttgggaagcttttagcctcgaagaacccataggcagacttgcttgggttctccaaaggcaaaccacttgcctccccttaactcgatcagaggcagcctaaagctatattctgtctggcatccacaattactgccaaataaactcttccccaagcaatcactttattatgcctctggagtctatgaatctcaggaatttggacggcacacagaatggcttgtttctgctcccgattcaagaggtctcagctaggcagactcaaagatgagaggggactcagtggttaggggctggaaccttctgggtcatcttcactcacatgtctggtggttggtgccagccgagctgtcagtcagaacacctgcctagtttctccacatggggtagtttaggcttcctcacaatatggcagccaaatgtcaagctccagagtcccaagagaaccaggaaactatcactttttttttttttgagatggagttttgctcttgtcgcccaggctagagtgcaatggcttgatcttggctcactgcaacctctgcctcctgggttcgagcgattgtcctgcctcagcctcctgagtagctgggattacaggcgcccaccaccacgcccggctaatgtttttttttgttttttttttttgcatttttggtagggaagaggtttcaccatcttagccaggctggtctggtactcctgacctcaagtgatccacccgcttgggcctcccaaaatgctgggattacaggcctgagccaccacgcccgtccaggacttccacatcttttgagtgggacactattcaacccataaccatgacctagccttgaaagtcacatggcatcacctctgctgtgtcaccagcccctccccccaggaacaaggggaaggagcgtggactccctcttgatgggaagtgtgtctggggcatataaggtgggagatactgttgcagtcatttttagaagatgcaatctgccaagacagtgtttgaaaaacatttatttttagttgctagtatttaagcataaggggaatttacataaaacttgatttcttgttcttaaaaaaatcagaagaacccaacagcattgggctctgatttccccatggcagcagccagtgagagctgccccctttaggaggcagggcgctccagctgacccatttcctgggtacccccttctgaggccccaccatatcagttgccattactcaccatgcagagctgtgacttcccttgcacgcagcctgcttctctcgggtcagtaattgctgcctgctgtctgggcaactgagggggtccccttgtcccccacccccaggctgtgcagaataagatccctgggcaactgagggtgctccctgttccccccaccctctgtccctctgccccaggttgtgcagagggaggtccttggggtggaaccccagaaacttcccccagggtgaaatcacagtgtcatgatcttcacaacccaccctgctaccctgagaaccaacagaaggcaacagacgtgagcctggcccctgattcacagccccagtatctgcgggactggtccgggcaggaggacgaggctggacaagcataggcagctagctgattgcagggggaaggacaaggtgggggtggggaggctgcttggaaaactgcaaacagatgtggtcatcatagccaccctcgtggggcccaccagcgccgcctccttctgcccctcccccacgggcctccttccaataaatgatgttggggctacttctgaggtagcttccctgacctcccgcccttcccatccacatgtatcttctagaaccttcccagatcttccctgtgactggccaaatccctttaccgaaaatgctacggaagtaaacaacaccaagtttgccaacgctgtttctatgtcgtcttaggagcctccaactggagcaataattttctccgtggaagagtctgcggaacagaagcagcccaggtcttgggtcagagaatggtccttgctgtgccgggtcctgtgtaggagtgtgggccggtcccatcacccagaaagcagagccctcttcaagcctggattgggagagtccccaggcaatagggatgtccctggagaccctagctgttacctcccatagttacttagcatctctgtatctcctgctcctgcctttgtaaggttaagtgatttaacttatgcaaagtgctgtgcaaagcctttaacacttgcatgcatctttgatgaagttccgtttccttcatctagccacatactgttgggttctagtagagtttggccaatgtagagagactcgccttgccctttgcgctcccagagtagcgcgagggtgaagtgagcccaggcagcaggatagaagcctgccctgcttccccacgtaccaggtactgtgccaggccaagaaaacagcatgtccttccttctccctctgcgccccacctccaatgcaccagtgctccccagagcccctgcctgtacccagagccagacacagatgacaggggagaggccctggagttccggtcccggcatctgtgattaatattttgcaggttgatggccggtgagcatttttcctgaccccggggaacgacttgtttggctcttagtgaggggtggaaacaattttaaaagtcgggggagggggaggttgggaagaaacaggaaaacaagtatcccatagttgccaattgaacccagggttggctgatgcttttctgcagaaatctaagacggctgggggagggagcagggaggaagaggaggggagtggaggggaggcccaaggtcccagaggggccgtcctggggtcccgctggagtccgggagtttactgaacctaaactcccaaagagaaaagatgcacattggagatcccaggagagctgctcattcattctctagggctgctgtaatcaatgaccacaaactgggcggcttaagccaacagaaatgtcctctctcacagttatgaggctagaagtccaaaatcaagttatcagtagggctgtgctccctctgaaggcttaggggagaattcttgcttggctcttcccgtttctgagggttccaggcagtccctggcatttcttagcttgttgcttcatcactccaagcgctgcctgtgtcctcacatggctttctcctctgtgtgtgtgtctgtgtcgtctctctcttttcttcaacttggattttgcattcatgggatacatgtgcaggtttgttgcctgggtatactgcgtgatgctgaggtttggggtgtgactgatctcgtcacccaggtagtggacatagtacccaatagggagtttttcagcccatgtcctctccctctccttctccttctttctttcttttttttttttttttggtgtgtttgtgtgctttatttttttttaaattttttattttttttgagacagagtatcgctctgtcacccaggctggagtgcagtgatgcaatcttcgctcactgcaagctccgccttgcaggttcacgccattctcctgcctcagcctcccgagtagctgggactacaggtgcctgccaccacacccggctaatttttttgtatatttagtagagacggggtttcaccgtgttagccaggatggtctcgatctcctgaccttgtgatccacccgccttggcctcccaaagtgctgggattacaggcgtgagccactgcgcccggccatgtgtgctttattttttgtggtggagtctcgctctatcgcccaggctggagtgcagtggcatgatcttggctcattgcaacccccacctcccaggttcaagtgattctcctgcctcaggcttccgagtagctgggattacaggcgcacgccaccacagctggttaacttttgtattttttagtagagatgggctttcaccatgttggccaggctggtcttgaactcctgacctcaagcgatctgcctccctcggcctcccaaaatgctgggattacaggcgtgagccactgcacctggctttttattttttatttttatttttttttgagatagggtctctgtcacccaaactggagtgcagtgatataattttggctcactgcaacatctgcctcccaggttcaagcgatcctctttcctcagcctcccaagtagctgggactacaggcacgtgccaccatacctggctaatttttgtatatttggtagagatgcggttttgccatgttggccaggctggtctcaaactcctgggctcaggtgatccacccgcctcagcctcctgatgtgctgggattacaggtgtgggccaccgcgcctggctttcttcttcttttttttgtttttgtttatttgtagtgataaagtctcactatgttgcccaggcttgtctggaactcatgggctcaagcaatcctcccgcttcggcctcccaaattacaggggtgagtcaccgtgcctggccatcctctcttctttttctttctttcttttttcttttgagatggagtctccctctgtcgcccaggctggagtgcagtggcgcgatctcgtctaaccgcgagctccacctcccgggttcatgccattctcctgcctcagcctcctgagtagctgggactacaggtgcccgccaccacacccgctaattttgtttttgtatttttactagagatggggtttcaccgtgttagccaggatggtctcgatctcctgacctcgtgatccgctcgccttggcctcccaaagtgctgggattacaggcgtgaaccaccgcgcccagcctctctcttctttctcataaggacacaaatcattggatttagggccagtctaatccaatatgatctcatcttaactaattacatctgcagagaacctgcttccaaataaggtcacattctgaggttcctggtggatgtgatttttggggggacaacatttagcctactgcactgcccttgacaatcttatctgggagtcacaccagaaccccacaggggttctagcaagtgtggacttgacacaaactactttagaccagggttctgcaaacttctgaccccatctgtttccgtatggcccatgagctaagaatgattgttacatgtttaaatgattcagaaaaaaataaaagccagaatgatatttcgttacatgtgaaaattatatacaattcaaatttcagagtctttaaataaaattggattggaacacagccatgcacatatgtttatgtattctctgtggctgcttctgcactatgacagagactctgtggccggcaaaaccctttagggaaaatgtttgctgaggccgggcgcagtggctcacctctgtaatcccagcactctgggaggctgaggcaggcagatcacctgaggtcaggagttagagaccagcctggccaacatggtgaaaccctgcctctactaaaagtacgaaaattagccgggtgtggtggtgcgtgcctgtaattccaactactcaggaggctgaggcaggagaatcactttagcccaggatgcagaaactgcagtgagccgagatcatgccactgcactccagcctgggcgacagagtgagactgtgtctcaaaacaaaagaaagtctgtcgaccccaggaacattttttctttttttttttttttctgagacggagtctcgctctgttgcccaggctggagtgcagtggcgtgatctcggctcactgcaagctccgcctcccgggttcacgccattctcctgcctcagcctccggagtagctgggactacaggcgcccgccaccacgcccggctaattttttgtatttttagtagagacggggtttcaccgtgttagccaggacggtctcgatctcctgacctcgtgatccgcccacctcggcctcccaaagtgctgggattacagtcgtgaaccaccgcgcccggccggaacattttttctttaagagacaagatcttgctctgttgccccggctgcagtgcagtgatgcaaccatagcccatttcagcctcgacctcctggactcaagtgatcctcttgcctcagcctcccgagtagctgggactataggtgcatgccaccatgcccagctaaaggacaatgttgtttggaagcaacgtttcctgcctcatctgtggcccacccagagtttggaggtctcccctacttttctcctccaggtcaagcagtgtcttaaccctgggtgaaagctgcttcatggttaaaagagggggcacaacgaagccaggcagccggagttcaaattctggttctggcacttccatggcaggtcccttcacctctccactcacggcatctttttttttgtttgtttttgagacagagtctcactttgtggcccgatctcggctcactgcaacctctgcttcccaggttcaagtgattcccctgcctcagcctcccaagtagctgggactataggcgcacaccaccatgcccggctaattttgtatttttagtagagacgaggtttctccatgtgggtcaggctggtcttgaactcccgacctcaggtgatctgccttcctctgcttcccaaagtgctaggactgtaggcgtgagccgctgcgcccagtcccccgtcaaagacttcttaccttctacaacacactagaaaatcccaccctttgtggtagaagcgctcagcaaacctctttggatccaatttcactcactctttatgggcgttaagaaaagagtatatgagacgtgcatatgatgggccctgggtaaaagagggtaaggggtcatggggacagcagcaccggaaggcacagggaagcactgccgtgggcctgctggtcccattggcccctcctatcccctgaccttgctgtgcgccccactgggaggctgccccgtgtggatggcatctcagtgtcttccaaattctcatttggtttggaccataagaaacccaggcagttgggaggctgaggcgggaggattgcttgagcccaggaccagcctgggcaacatggtgagttcccttatgtaccaaaaaaaaaaaaaaaaaaaaaattagctgggtatggtgatgcatgcctatagtcctagctatttgggaggctgaggcaggaggatggcttgagctcaggagttcaaggctgcagtgagccatgatcatgccactgcactccagcctgggtgataaagcaagaccccgtctcagggaaaaaaaaaaaagccagacatggtggtaggcacagtggctcacactttggggaggctgaggcaggaagataccttgagcccaggagttcgagaccaccctgggcaacatagcaagaacttccctctattttaaaagaaagtaaaaaaaaaaataaattattaaaataataataaggaaagaaagaaaaagcccaggagaatggaagacggtaggagagcgaggttgggagctatggatcccctagcaccctccctgcctctgttgggcgtctctgtctcctgccagccatctctgtctgcaggttccagtgacttctccctgcatttgccagccaggcctggggtggtgatgaccccagctctcactaccccgggtccttacccacaatctggtgaatggtctcttcctgaaactcctgaaatgggcctgtgttgagtgcgccattgctttccagcttgactgatagactcggaaaggtcggttcagctctccctcccaaagtgctgggattacaggagtgagccaccgcgcctagccaactttttttgtatttttagtagagacaggttttcaccatgttggccaggctggtctcaaactcctgaccttgggtgatccactcacctcggcctcccaaagcactgagattacaggcataagccactgcgcccagcttctccttggttttcgaaagcgccatttcaccacccatcttcttagcagatttaccttactgtgtgtgtgtgtgtgtgtgtgtgtgtgtgtgtgtgtgtgtgtgtgtgtgtgtgtgtgtagtcattgtttcttcccccctactgtatttgaccggttacagagctgtagatggccaaagttcactggccacaattagggaggagccagtctgggattcaaaatcaatgaagaggaagattggaattaaggaaccgaacgctggccaggtgcggtggctcatgcctgtaatcctagcactttgggaggccaaggtgggtggatcccttgagcccagcagttcaagacgagtctgggcaacatggcgaaagctcatctctactaaaaatacacacatacacacaaattagctgggtgtagtggcgtgtgcctttggtcccagctactcaggaggctgaggtgggaggatcacttgagcccaggatgttgaggctgcagtgagctgagattgtaccactgccttccagcctgggcaacagagagacccttgtctaaaaaaacaaaaaggaaaagaaaaaaggaattaagggacactgtgagccttctggcaggtctagaacagaaatgccttctgtgcctgccacattttggtgttcaaagcgttttcctccaagtcccattattttatttgatctttataataacctgattggtggtagatcaggggccactcacttcccctgagaaaagatgctttaagtctctccatttgcaagggaccattctagaatcagaacccactcttctgactccaggtccagaatgtcttccatgttattttctttcctttccttcctttccttctcttcctttcccccctcccccctcccctcccctccgctcccctcgtctcccctctcctctcctctccttctttttttcttttctttcttagagtttccctcttgttgcccaggctggactgcaatggcacaatctcggctcactgcaacctccacctcctgggttcaagcaattcttgagcctcagcctcctgagtaactgggattaacaggtgcccacaaccacgcccagctaattttttgtattttagtaaagacgaagtttcaccatgttgcccgggtctcaaactcctggcctcaggcaatccgcctgcctcggcctcccaaagtactaggattacaagcgtgagcccctgcacccggctatgttattatcttttaaccaaacatcctcagagcagcgggcatggggttatgtgtaatgtgggattccaaatgatgtataagatcaaaattatctgtagtcaaaattacccttgaaaatcggtcataaagtaccgtatacacggtttgtgcgtgatatgtccagaagcagtctcatctgacccccgtttagtgaactagccatactgatggataccctatattccttttgcaaaacaaagagatgtacacagtagcctgaatgctgaaggtagtaggctgctttctatcaggccagcatacgtctgctcctactgaattgagttgtatgtttacaaggagtcaattatcattgtttctgaacttgtttatgccagttgtactttttatagtaattacataatttaattaaatatgatgtaagtagataaaataagagtagaaaaggagaataactatttttctgaaaattatgttcaatgttttggaaacagaaagttgcaataaataaataaataaataaaagagtgggttagaggccgggcgcagtggtgcatgcctgtaatcccagcactttgggaggccaaagtgggtggatggcttgaggtcaggagtttgagagcagcctggccaacatggtgaaaccccatctctactaaaaatataaaaattaggccgggcgcggtggctcacgcctgtaatcccagcactttgggaggccgaggcgggcggatcacgaggtcaggagatcgagaccatcccggctaaaacggtgaaaccccgtctctactaaaaatacaaaaaattagccgggcgtagtggcgggcgcctgtagtcccagctacttgggaggctgaggcaggagaatggtgtgaacccgggaggcggagcttgcagtgagccgagatcccgccactgcactccagcctgggcgacagagcgagactccgtctcaaaaaaaaaaaaaaaaaaaaaaaaaaaattaaccaggtgtggtggtgggctcctgtaatcccagctctcgggaggccaaggcaggagaatcacttgaaccagggaggcagaaggttgtagagagcagagattgtaccactgtactccagcatgggccacaggccaagattccatctcaagaaaaaaaacaacaaaaacaacaaaatatatatatatgaaaaaaatatatatatgaaattccctgctttagttgtgtttggttagttaagcagcctctgtatgaatgtctgatgtgcattatgcaataatgtacactgtgcaaaataagtgtactcattgagtggcattacatgtcctattaaaatgatttccctaccaggtatggtggctcatgcctgtaatcccagcattttggaaggctgaggtgggaggatttcttggtcccaggcattcgagaccagcccgggcaacaggatgagacctcatctctacaaaaaataaataattagctgggtgtggtggcatgaacctgtggtctcagctacttgggaggctgaggtgggaggatcacttgagcccaggaggttgaggctgcagtgagctgtgttcatgcctcatgccactacaccactccagcctgggtgacagcgcaagactctgtctcaaaaaaaaaaaaaaaaaaaaaaaaaggccggatgcggtggcttatgcctgtaatcccaacactttgggaggccgaggtgggtggatcacctgaggttgggagttcgagaccagcctgaccaacatggagaaaccccgtctctactaaaaatacaaaattagccaggcgtggtggcacatgcccgtaatcccagctactcgggaaggctgaggcaggagaatcgcttaaaccctggaggcagaggttgcggttagctgagattgcgccattgcactccagcctgggcaacaagagtgaaactccggttcaaaaaaaaaaaaaaagtagacagagagagattttccctctgtttctcttgagtctattgagtccacatgacttaagtaatgtgagataaatgtggtataatgcaacaccgctgtactcataaattcagcaatctaagccctaactctaaccctgggtagattaactgggttagatccaccaaacaacatagcatttctcatggcattaagatcactgggaagtggggtgctagctctgtagaaattaaaataaaaatggacaaggagcttgccttaaaatatcagagaggcagcattatgttttgagagccagaaggctttagtacaaatcctggctccaccactccccgagggcaagccacttaaagtctccctgtcccaggtttcctccttgggactgtcgcaaagattccatgagttaataaacgtaaagtgattagaactgtgcctggcacagagtgaatgccatagacatattagctattgctattattattattcactataatttgcacattgcatcaagtaggttcttattctaaaagtttaaaataaataaaatagtgcatttcactggaaggcactcacttatgcattaagagagcagataagtcagacccttgactcttctctgcaaaagcacagcatggctaaaaattgctgtctggggaatgaactgcttgggtatgatactgggacaggtgaccccattcatgtaacaggaaggaaaagaatgttgcttcaaatctccaaaaaaaaaagtttatttataaaatactgacagtttgacaggacacgggacttcttgtggtatatatttcaaatcaatttctttcttacctttcatttaaaaaataaacctgctaacacgctatatgacatagagatatatatttttttcttacagacagacacctgccataatgaatactctccccataattttttgttatatcttttaaatcaaaaaataaagatttgtgttgatttttgtttctggagtctagatggatggagaaaggtaacacgtttaaatgcttttggttattctgatggaaacaaagagaaggggggtggtcccgagggggcacctgtgctcaggtggtggtcaggattgccatgtgcgcatgcccatgggtgtccctggatagggccatacagaggcactggggagcgggtggcggctgctcagatggtctcccctttaccttcctgcccaccagcccctcacccagggtaggcaccttcagatgtgcactctgggaagctgagggaagcccctgcccagccagagtggcactgtggtgaggctctggcacctttagaagcactgcccagggaggcgtgggcagcaacagaaggccttgaggcagcgtgcaccaggtgggggcagcccccgctgtgtccttgtttcctctaaatcacggcagtgccaggtttgggggtaggagttttgggggccggggggtgagggatggacagaaggggaggcagcctgggtttgcaaactctctggagccctaggaggatggtggttctggagcccagagcatctttttggtttgtcttggcagtgtgggtgtggagctgacgtcaactctggaggcgcagccaggaaggggaaagccctggtgtgcccagcatgggctcctgggtgcaacactgggagattgcttagggcacaaggaggcaatgccaaaggtgccaggtgtgtcctggtgtgaacctgctttgggtggagtcccacaggcaggggccctggcatcactggcacggaaaatcacaggccagaaagggtcccactctttctacaaagggcagggcccaccacccctttctaatgtggccaggtttctgggaggacggttgggagcctcggctgtgccagtagatatgtaaacaagggcaaagagacgtgtcctgaaaaaatctagagttccacagctgcaggcctgggcttccagctgtggctggggctgtggagacaatattccagatgagtgggtattgactaagtgtgggactttcaccatgggcccagcctgatctcatgggcttgtctaaatttgcgtggtgtcctcaccctctcagacaatagatcccagccacgccccaagtgcaagcaacccaggccacctgtgcctcacaggggagagatggcttcagccatcagagggagttcaggagtctctttgctaacacacatacagatgtgtgttctgtgcatatttgtgtgtgcatgtgtgtaagcacaggcgtgcatgggcaccatcccgcatgtacacgtaggtgtcagcatgggtgcgaatgagcgtgtggggagtgggggggtggaatatcttagtgcaccaggtgattcattaaaggcaaaggaaaattgacctcatgtgcaatatatacacagacacaatgtttttactcactcctgcttcctcccaaataatccctcactgggctgggcttaaataattccctaatgcaaactgggaacttccttaaatggttaaatgctcagcagagagggaaagggatgaagttatttaaaaaaaaaaaaaaaaaaaagatgagaggaaagaaaagaaagctgtgcggcacgatcacaggccggcagctgcagatgtgctgccatggagatgccagatgctgcagagggtgggggcggaggtggcaggggtggagcaggtgtccagctgactccactgcagcccccagacaagtccaaggaggccccgagagcaccttacttcctggaggggcagaacctcagcccttggttctcctttggggaagattgtgcttcccttcccaggcctccttattggagaaaccgctttttggacactggagctgggctggcctgtctgctgagccatcttccagcatctccccgttcacatttcccaggggtcaagtgcttcaggaaaaactcatggctgggtgtgcccgttctttgggccccagaccctgacttcccttcccggtcaccattagcacagtgactgacttggggctgtaggagagtggtccaggctctctcttaccttggcatgtttcccaaatctcctacttgggcttccttgaactctgctcacccaccccaacagagcatcatctcttgggcagggccagcagcgcctgtacacagtgcacagagggagccctgctccacgaaggggctcacgctgaatcagacaggcccctgtgggccatctgccacccatctcagcggtggggcaggtgttgggctggccttacagggctggctgagggcacagagggccttggacaatgtatggagttagatagaaaggcttctccctaaaccctggcatccgtaagtaccaagtggacgggaagatcctggccactggatgtggctttttgcagaacactccttggagcagattgtgtatgtgtatgtgtgtgtgtgtgtgtgtgtgtgtgtgtaaaagcattccctcccatcagctattcttgtcacttggtcccatctgacctgcccctgctgggcgtgcaattcaaatgctgggtccactttggactgagcttcctgacctgccccttcccctccccgccctggccaggcggagcccagcctggaagctgttactgggggttagggtgtctttgcctttttgcctgtaaactgggtgctaggctgactgagcaaactctgggtattccagcctctggaccagggacttgggccacccctctgggctcctgtgcctctgtgcttaggaggctgccgggtggcagtgagagggacacagatctgaaagtgagtgtgctgtctggctaggagggcccagatgagtttgttctggagaggatccctagaccctgttccttgtaagtgcatgggagatgtgtgtgtgtgtgtgtgtgtggtgaggatctatccagtggagagtgacgtgtctgcccagagggagatccctcagctgtgccccactccccagccttgggaagctgactacccctttaaagagaggacggatggaacctggattggaagaaagagaacagtcaaagtgtcattcttatcttgcccacaatgcgttaaacctaatcatcccacagtgccaaggccagtcgccttatttacacctctgctccccagacttcacctttccttgtccatgctcaggaaagtcaattccagcacagggaggcaggggtcagttgtggggggtttctcccctacccttgggctctcttccttggattcaatattttaaaaaatatgcaggaacaaggaaggcgctaagcaaattctcaccctttagttttttgttttttgtttttcttcctttttctaaataaaccaaatgcttggtggagaagttgagcaggggagatgggcagtagaggttgccaagacagggcagggggtctggatgaggctgtccgatgcctgccagccacagtgatggtgcatggagggaaggaggagcagagagagaagataggcgtggcctccgggatgcccattctttttgcagagagcagcggcagtgggtccaggggtcctggaggggctggaagggggcagctggctggacatccagaagctttttcttccctcggccacgcctgcctggcggcctccagtccttagcctccgctccctctctctctccagatgcccgccccactccgtgtccatagcagtgacacagccacttccccagctccgtgtaattcccaagggagcagtgaaccccaccatctcaaagctgaagagctgctggccacacacatcctctcacggttttctccctccttctgaacgccggctttgctggccctggaatctctggaaaaataaactcaggaggtgaaaagttgacttggtttcttggtgtttttgttttctggcaggcagtgagaggaggggtgaaggaggagtttggtgccatttctctttctgctttttcctcttctgatgtcaaacaaatgatgaaaatcctgctatgggagcccgggagcctggggccaggctgctggggggacggtagagggtgctctgctgacttggggggttaggggggttctggggcgttggagtccgactggccttgggccgaaagaggctgccctgctgggtgctggtgctgttggtgacggtggtgtggtctggctcacccgagtcgctctccgtgtagctgtaggcctgtgccctcgagatgcccttctgctgtcgccgccacgagttgtagtatgtggggtcactgatgtagtggttgacaaaggagtgggccttctggtggtttgagtcgacctcgtactcgctgtcacttccctgggaggacagagaatcagggtgtgtcagtggccccgtagggacaggccattgtggttggggccggaaggcacagggcattctggttcaaaactctgctctgcctctttcaagacttggactgtgggcctcccagccccctcactgccaagggggtctggtgcccgtttgtgcccgcctgctgcttccttcacagcagatccggaaccggaaggatctactatggggttggcccagagctgggagatacctgatagaatcagaagacctgagtttttttttgtttttgtttttgttttttttttttgagacagaatctcgctgttgccaggctggagtacattggcatgatcttggctcactccaacctctgactccctggttcaagcaattctcctgcctcagcctcctgagtagctgggatgacagacatgtgccaccacgcctggctaatttttttggtatgtttaggggtttcaccatgttagctaggctggtcttgaactcctgacctcaagtgatccacccgcttcaccctcccaaagtactgggattacaggtgtcagccactatccctggcaaattttattttctttcctttttattcttttttttggggggcggggagtggaaggggcacagggaatcactgtgttgcccaggctggagcacagtggtgtgatcctctctgtagcctcaacctcctaagctcaagctatcctcccatgtcagccttctgagtagccaggactatgggtgcatgccaccacgccccactaacttaaaaaaatttttctcttgtgatgagctctccttatgttgcccaggctggtctagaactcctggacttaagtgatcctcctgccttggtctcctaaagtgctgggattacaggcgtgagctactttaccttacctttgttttcttttctttctttcttttttttttgatacgcagtttcactcttgttgcccaggctggatgcaatggtgcaatctgggctcactgcaacctccacctacccggttcaagtgattctcctgcctcagcttctggagtagttgaaattacaggcacctgccaccatgcctggctaattttttgtatttttagtagagatggggtttcaccatgttggccaggttggtcttgaactcctgacctcaggtgatccacccgccttggcctctcaaagtgctgggattcaggcgtgggccaccgtgcccagtctacctttgttttcaattgaagtgaggttcacataaccgaaagtgaaccattctaaagtctatgactcagtgcattaggaccgtcgcagtgttgtgcaaccaccacttctatccagccctgaatcatttccatcaccccaaagtaaaaccttgtacccaggaagcagtcactccctatctctgcccctaccggtcactccctatatccatgcccctggcaaccactaatctgttttctgtctccagggattaacttatttgggactttcctataaatgggatcatataatatgtggtcttttgtgtctggcttctctgacacagtgtcatgtttttgaggttcaaccacaacctactaagttaccatcttggtccagcttctgctttactttgtgactggggacaaagccagagcctaattaagacctttagaggctctggacagtgaaaaatgcctgtgcctgtccacgtgtgatccaacataaaaacaacacttggttacaaactaagcatgagaaaaatctaaaccaaagttcagaattttcatgtaatgaaaaccttaaagttttttttttttttttttttttttttgagatggagttttgctcttgtcgtccaggcttgagtgcagtggcacgatcttggctcacctcaacctctgcctcccgggttcaagtgattctcctgcctcagcctcctgagtagctgggattacaggcatgtgccaccacatctggctaatttttgtatttttagtagagatggggtttcgccatgttggtcaagctggcctcgaactcccaacctcaggtgatctgcccacctcggcgtcccaaagtgctgggattacaggcgtgagccaccgcggctggtctgttttttttttttttttttaagagacaggggtctctctttgttgcctaggctggtctcaaactcctgggcctaaactatgctcctgcctcggcctcccagtgttgggattacaggcataattacaccacacccagcctgaagttcttttttacttttaaagataaaaatattaaattattcctgacttttttttttttttttttgacactttgatgtcctaggcacaggcttcatctatctattggggacatcagccccaaacaagaatcaatctcggttggaaagtaaaatctgaattgtggagctaaaaacatggtgcaccccttcccctaccctgagctcccagcaatgttttgagagctaataagacaacagatgggccccccctcagaactctctggaagagaagtgctccgattttagcgcacagcacacgatcagtgcactgcagctcagaggaccccacccaggcctcctcagtcctgcccagctaatgcccctgcctgggggcagttagcgaatcacagcaatccaagtagaacataaaagccagttagcccaatccagacaagtttgggatggggagctgtgtcctgctttacaggtaaagaaaatggagtggggacctttgtccagagggtctgggctttgggaaatgagatgcacggcttgttctcaggaactcggagtccttcataacatggggatacatctcgagggatgtagctacaatgaatagaactataatgatccccgctaatggagcaggccctctgccagacagtctgaaacgctgacatgcataactgtatttagttttcacacctctgtgcggcagctcctattgctacctgagcaccgacgctgcctgggtactgacgggcacataaagtacaggaagggtgagggttttgctggggaagtgatccggccgggcttgaactccaatctgcctgattttctaaagcccacacacctcttaactcctacactcctgcactcctgcctggagaccacaggatgggaacgagagctccccccaaaccccccaccccgactcccagcaggaattaaatactccctagtccatctgctaatttatgttctctggcccctcccctccctctcctcacccctctacaaccccagccactctccttaccacccctgcagcagacactcccccgccaggacctcaatcctcttggcaggcacagccggctgcccaagacaatggaaagtccctgggctcggtctgccccatgacgcaatgcagcacaatacaagcccctttctgtgcctactgcccagctgcccgcccaggagaacaaagagggggcacaggcaggccagggagactccatatgccgagcgggggcacctgatgctgggccgagtgaggctggcctggagcagcggggatctgtgaggcaggaggctgggggtccatcccgcccaggaacagtgagggtctgtgaatgcgggggaccagacagggatgtcccccagttttccctacaggttcggtctttccacccactaactgacttgaacagttgttagcatcagctccaggggttctagaattttggctagccccaggccccagctttgcagaggaaggaacccctgggtgactgtgggaccatcccacagtgaaacgagtctctggggggaggagcttgtggcacggggaagttctggctcttaccagcagaggaagccatcactcaggctctctcagcctcagtgtccttgtctgtaaaatgggtagagttccatagttcacagggtgaaatgagctaacccaggagagaatgctgtaaaaggtattatcaatggggacagtgagggtgggcctgggtgggaaagggaagagatggagtgagaagcctcaaagctcccctgggagggattagaaggggccaggaagccggggaggctgactcagtgctcaggcaggtggaatgggagtagaaggttagctgataccccacccactaacccccgactccaagacagaggcatgtccggactggaagcaaggtggggagtgggattctctagccctcctaggggcccagatcccaaagcccactcatctagaccatccccgtcctaccagctactatctgcagaatgcctactgatcccaggcactctatgggcagcatctcggggatggaaggcactagaagggagagcagggagccaaacagagcccgcgctgcgggaggggccaggcaggcgagagtctggtctgcctcttcccccgctccgccttccaaagccaaggcaggagggctttgcatcagcgactgctgctcccgcctccatctccctgaacatctgtttcttttcggagtgggggtagggcgagaagagaagaaagcgagggggagaccaggggctcctattgcagctttcaattctcacgggcctcggtaattgaatgcagcttcccagggaccggcccagcacaaagggggcctttcaggggctgtcctgccaggccgccaggcaatcaagtgactgcttcgtctccctggtctcttaacagctcctcaaagccactcaatcagcaattactggggtctgcggagggggagcacagactccaggcctggtgatgggagtggggagggagggccagaaggaggcaggacccctggagaaaagaggaagcaaagcaaagcccttttgcttttttgttcatctccagcccaaaggatctggcaccagactcagccttagggatggtgttgagaccttggggtcaggcaggggacccttatcttgttgaatctcatgaagtctgggaggaatgtgttgccctagatgacagagaagtcaccttgtgaaactccgtgggagactggaagcaggagcccctccctcatccacggtcccaggggctctgcactgactctagcctgaagccggcagcgcatctgtgcggggtgttccgcctgtcccctggatgcctctacccggggggccagccagggtctctctgcaggggctgcagcctctggattaaaggtggggtaggggtgatgtgtctcctgtgtgtctctgaagaacctcagaattgtgcccctggaggcacaattttgtcgaggctctgggctccctgtgttaagatagctggaaatctcccaagaatgtcctttgaaaaatgtcagctcagaagcaatgtcatatgtgccacctgtgcccttataggtaaagtgacagccaatgtgtacccctccccccacacccacaaccggctgtcagagatgtctgtggtcaggaggctcaagggaggtcactggggtggggttggaggcagtgaaggcctctttccttcaatctcctctccgtgctgggcagctgcacgaggccaggctgcagtaggcatgaccctccaagcaagctggctctagatttgaatcccagttgcttgtacttctgagctctgtgaccaagggcatactgcctcacttctgtgaacctcagtttccccagctgttaaatggggatagtttcacttgcatggcaggacagctagatgttaaatgagaatatacaaagcacagggcttggcacacagtatgtagctttgcctctccccggcctgtctctgccccacagcgtttcttgtttggcacaactttgggctgcgaggatctgggggatggtcaggctatcaacgaggtctcagctgagcctgttggactcatggcccaatctgatggaaaagaggcaaacacaggcaaaaggtcagagccgttcagtagaatggtgacggcagaacataaccctgctccagccagctgcaaacctgcacgcttcccttctaggcatgacccagtgctgttcacactttgaggcccagctcaaataaatgccacctccttcaggcagccctctctgagcctccaggggaagtggtctccttatggtgctttatctgcctctgcatcgcaggaaagaaacagaaagacttggccgggtgcggtggctcacgcctgtaatcctagcactttgggaggccgaggtgggcggatcacctgaggtcaggagtttgagaccagcctggccaacatggtgaaatcccgtctttactaaaaatacaaaaattagcttggtgtggtggtaggtgcctgtaatcccagctattcgggaggctgaggcaggagaatcgcttgaacctgggaggcagagattgcagtgagctgagatcaagccattgcactccagcctgggggacaagagcgagacttcatttcaaaaaaaaaagaaaaaaaaagagaaagacttttgttcaccactttcttcctcaggttgctgtggttccataatatttgaatgagaaatgaaaacgtggttatttatacacgtatggtcttccctagtaaatcataacatattataacgcaacattcattagagtctgtcttgcccactactgtagccatcgttcctatatagcgtctgattccattttgtgggtacagaacaaatagctgttgagtaaatgcatcaaggaatgaatgaatgagcttcatagagagcaaacccatcacttactcctcccacgtaccacacagagtcttacctgtgctggtatgcagggcagatgtcaatagggagaatgggggcgggatgcattttgggcttgttgtcaggggtgggggccttcccaactctctttttcatcatctttacttgcaaatggccttaatgccaccagtgcttcctagaggactctgaagcttaggtggtgtcattcacgaacaatccttagaatccttcctggcttctactgaacacttcataaatgtttgctattataaatcggtgcataataaatagtacagaaaatatgattcacggctgggtgctgtggctcacacctgtgatcccagcattttgtgaggccgaggtgggtggatcacttgaggtcaggagttctagaccagcctgaccaacatggtgaaaccccatctctactaaaaatacaaaattaactgggcatggtggcacacgcgtgtaatcccagccacttgggaggctgaggcaggagaattgtttgaacccgggaggtggaggttgcagtgagctgagatcgcgcaccatcatactccagcctaggcaacgagggcgaaactccgtctcaagaaaaaaaaaaaaaaagaaaaagaaaacatgatttgctctgtgtatctcctttttaaagtgtgcttaatttgatttcaacgcacttgaagaggctgtccatgatactgcaagaactgaagatcaagattagatggtgtgtgccattggctcggaatttcttttccattgagatttacttgtgtgctaagtatatacattttttttttttgtacaaaacttgggctcttcttttgaaaatgaagttgccgtccagccaggctgcagtgttaaagttccatcaaacaggcctttaaatctccagtctttgtgtgcatcctgccctctgcctggtgcccccttctcctgcaccctgggccctctacgggagagccagcccctctctcctctagcccatcacccccagctgaattatagcctttctcacatcacatcatatgtgtttgtttataagtcaaactgacgctttgtttattgccatatcacaggaaaacgactgggcagatttctgccaattttggagagtgggttttgggtggtctgtctcagaatataaaccaggtggcgtatgcaaaacccactctccaaagacctgggggaaggggtgtccttgaaaagagaggcagtcatttttcctggcggctgaaaccgaggggccctggcctgtgcagctgctgatcctcagggacgtacccttgcacaaactgtcacaggcaggagaactaccagtggcatccccatcagcccccacttgaaggtcgcaatggtgggggctccgcattgcagatgctgattggtagccgagctgcttctcacgtggctgagtggcagcagcactgacttatttaggagcctcataaggaccacagtggggccagcacagtggttcacacctgtaatcccagcactttgggaggctgaggcgggggaacacttgaggtcaggcatttgagaccagcctggccaacatagtgaaaccccatctctactaaaatacaaaaattagtgaggggtggtggcacatgcctgtaatcccagctactctggaggctgaggcacgagaatcacttgaacccaggaggcagaggtctcagtaagtggagattgcgccactgcactccagagcaagaccctggcttaacaacaaaaaaactcataacttggatcacgtgggttttgtcccccacaataagttcctgggtaagccatgctaagttgggggtctctgtccctgccagctttgagctagggagttaggtccagccttctcagctctgccaagcccatcagtaaccctggagctgaacaaaacagcagtgagtgggaggccctcagcccacggggcccacagcgtgatcccaggcttcctggcacctcctgcacagccagcagcccagctccctgctggcacctcttccttcacttcctctcccaggcctgggcagaaaggtccagggcgtgggatgcagtggcctttcgtggccctttcctcaataaccactgggcttggctgaggcagagggtgagggtgggaagctgtaaggctgcatggttggaatacacacagccccttccccacacagcctgggacagtgtccccacgtgacccacctaatggccgctctctgaagctctgtgtcttccagaggcaccgaccccctcttcatataaaagctgacatttacggaatggttgccgtgtgcctggctctacactgagttcaccagtgtctaactcagcagatcctccccacagcctcggacagagcctagtatcacccctgcctgttccacagatggggaaactgaggcttagaaaggttacttggcacacccaggacatcccaggtcacgagcagcaaagctaggattcacactcaggtccaaacctccaaagcttaatgtctccctggtctacactgcttctcatcctcagggctccagggcacccagccctttgtttctgaagctgttttgatgcgtgagtagtgaagctgagcatttttccaggtctctggcctggaatgcagggctgtgtgtcaaccttctccccagagtctccctctccgcaccttcagcgtgctctcttgcaggacagccctaatgagtaactaagcctgtggggtgacccctgaacgtagagagggccgtcttcttcggggtaccccctatgatcaaggttcccgggaccccattggcactggccgcaaactttgagcagaacttgggaggggacagatggcccatatatgacttcagggtggtttcttgggccccttaatatttgctgccccttgaaggaaaggaagaaagcccatctacgttcactgccccactctgggaggcgctgctccctgccccctgcaggacacctggccctcctgccctcacctgagagtcggagatttctgagggcttctccgtcaggctgctgctctctgcagggatgaggtcgttgtatttggtgacatcctcatccgagtagtgcaggctgcctgggctgggcctggggggagacctggagagagcgggggagtggggccgagaggtgcactcactcagagcggcctcccctggcctagggagaccacagtgggggcctggggaacacggatccctgccaccctgtgctcctcctccttcctgggtctgccttccaggggcccgggcctgggaggtaggaatctggaggaggacaaagagggaaaaatggggtgcccggctaatgctgtcatggcaacatgcagggtgaatgtaggggggatgtcaccgtggctgggttcaggaccccacatcctggggctgctttggtgcaaacgggatttttgtgtacacacagtggctttgggggcacacaggggcctggatgtgtgtgcactgtgggtaggagaggctgggaagggcaggggaaggtgaggccacgtgtgaaatgcccccttgttacatgtagtagggccccggagccagcctggcggggctgctatggccatgctgggcctggctgggcctgctgtgggggcctcaaacagctctttctttggaaggctggatttggcagaggataagagctcggctttgggagctcctccctccatcctctagatgaacacacacatagcttcgtccctctaagacagagacagagggaagctttgtgagctcctgagagaggctggactcctcctgactgccgcctccaatgagctgggaatgccaatagggctgaggctggagacaggagccctctggcccagtctttcttgagctcaggggaacagaaaaccgccacacatcaggggagggtcaggtgggccccagcagctgctcctgcccttggaaatgggcagcccgatggccacagggagtagggcctaggagggggctggggttagaaagaagtcagaagaaaataggagctgtgcttgcaccacgagccttgtcctgtcctcatgggctgctttcagatgctgccctttgaggctgatggggataggaggttgtcctttaataggtataaataaggacctgggggagagggtttcccaaatggggaggaagacaggagggcatagcgataatgcgggtgctcaggcgtccttcgctaaggtgtttttgctcggtctgcgttggctgggcctgtcttgcctttggggccagtgacgatctgcagggctgtttccctggcagttggctccgaacatcagtaggttggtttgaaaaattttgccagttatttgcattctactgtcactgtcaggaactcttagtagctacctccttgtaaatttctccccagtgcgccctcacccccaggctgtgattgggcatggtggggactgggaccctagttgtcctgcttgggccccactgtgtctttctgctgatcgttcccagccctggggcttgaatggtgtttcccaggacaaggtatggccaggtgggcactccctgctctatggccttccccagcattctccccacctgggcactgctgggcctggcccccaacccacgcagagggcccagtacctggtgtacaggccgttctttcggcagaaagagttcttgacggagagccgcctgttgttgagttccagggcagggaagctgctttcatccaagctcatcatctcgctgtggcctagggctccagacttggcactgttccctgaagtcggcgggagattgacaccctttagactgtgtggcctcccctctcccataccactctccacctggctgggttatcccctctttctcttggtagagttgagaccaaaataagagattgagattgtgtgtagaaaccctaggctgccccacccaccagagcaggtgcgctgccaggagccaggagagggacctgatcacccctgttctggccaaaaaggagatacataaaactcaagtccagccagcatggctggtgccagctcactcacccgagtctgtcttcttggcgtacttcttgctctggccccggatgatgagcacgaagaccagaagcaggatgaagatgaggccgaccagggcaatgaccaccaagaaccaccactcctcatagaaggggttggctttctgggctggagcacagatagtcaggtatatagggtgctcagccccctcctccctccaaatctcctgctccagttgggaccctactaactgctacaatctatgggaaggcagggtctgtaccctccgaatgaggcagaacctctgtaaggacagtttcacctcaagtatccgctctgatcagtcggtaaagggctgcctggagggctgatgtcagatgagttctgagatggctacctggctcaataggaaagagtgctaagattgattagtgatgtctgccagggacataggaggggagagtggcagtgtgttagctactttttccccttttttttttttttgagacggagtttcactcttatttcccaggctggagtgcaatggcatgatcttgactcactgcaacctccacttcccgggttcaagcaattctcctgcctcagccttccaagtaactgggattacaggtacctgccaccacacccggctaatctttgtatttttagtagacacggggtttcaccatgttggccaggctggtctctaactcctgacctcaggtgatccacctgcctcggcctcccaaagtgttgggattacagacgtgagccaccgttcccggccccttttctttttttcttttgtacttgtctaggagctatcttgataagcatacctaaatctgtgtggggaaaggtgcttctctggcctgcaggaggatgagagagcttttcctgaggtttagtttggagtgaaatttttgctggtagcagaaggcagggggaattgggaggatggacacaggggttctttagtaaaaggtgaaagatttacacgatctgaagaaaaaccagagtgtggtgagagggtctttaggatgtctcttccaggtagagctcccttttctcaaaacccctagactgtgctttctgcacccagccaggactacccatgctgtgtggacaagagatgggctctctgtttcggccttgaagcacttctgtcccaggatttggttttatcaatgtgggtaaaggagaagatttggttcttcaatgtgggcaatgtgtggcagggggaggaggctgggttcctttgagttgtgcttctgcttgggggaaggggcctttgtattctgggtggttagtgataacattttgggtcaagggtttagatagcagagccctttgtgcgctccaagacatgccagataggaagaatgaggggaggaaaatgggaggggtggtgaccctgctgcacccaggcactaggtcaggcctaaggcccacctgtgtctctgctgctctgcaggctgctgaccctgccacgttggggctggaggtttccatggaaagatagtttatggcctggtgcccatgaatgtcctgggtgatgagtgcatggaagtttgcatcttgggccctctgctctgcccctacccagggcttctggagttccttgaaagggagccccaaagatgaagatccctagtttcctctggtcttgagggctgacccaggcctgggcaccagcacttgcctcttcacagccccgaggggacaatgtgtttttgttcccgccccatgctcctggtgccctggtgcctctcctccttccgccctgcccagtgtcagcccccaggctctgctgtggggctcccccactccctcagcccccaggccggtacctggcacagactgggaggggctgctgggggtgccgaaaccatagtcgttgaccgcgatgacccggaagtcatagctcacgcccggcttcaggatgtccatgctgaacgtgtaggagctcacctccttggggatgtctttgatgaggatgtcccatagtccctcgtctgcaggagcacagagatggaggccctgggaggtgaggggaagccccaaatcccgctcccagccccgttctgactatgctccctgagggctgggcctgttggatcctccctgctccacactgaatcgcaggccttggtcctcccttgaagtttcttaaaaagacaactttcgggccaagcacggtggctcatgcctgtaattccagcactttgagaggccgaggtgggtggatcacctgaggttaggagttcgagaccagcctagccaacatggtgaaaccctgtctctactaaaaatacaaaaattagtctggtgtggtggcacatgcctgtaatcccagctactggggaagctgaggcagggaattgcttgaagctgggagatggaagttgcagtgagctgagatcacgccactgcattctggcctgggcagcagagcaagactcagtctcaaaaaaaaaagacaccttttggagcatctcttttattctttttattaaaatatctgtactacattaaaagatacgtactgtgcagaaagtactgtcacaaccaatgacagaaccaccgtccagagaaacaggctcaaggaattagcacttgtgcaagcagaacactatggattctgtcttccacttcattaaaaatggttggaaacatgattttaagtgactgcctaagacattatcatatgggaatacccttctttacttaactaaccccctttcctaattcaaaacatacacaatggtggcaggagacaaaaataagagcgctatttttcttttttctttgtttcgagacagagtttcgctcttgttgcccaggctggagtgcaatggcaggatctcggctcacagcaacctctgcctcccgagttcaagcgattctcctgcctcagctttccaaatccaccatgcctgactaattttgtatttttagtagagacggggtttctccatgttggtcaggctggtctcgaactctcgacctcaggtgatctgcctacctcagcctcccaaagtgctgggattacaggtgtgagccactgtgcctggccaatttttttttttttttttttttgagatggagtctcactctgtcatccaggctggagtgcagtggtgccatctcagcttaccacaacctccgcctcccaggttcaagctattttcctacctcagcctcccggatagctgggattacaggcttactccaccacgcccagctaaattttgtattttttagtagagacagggtttcatcatgttggccaggctggtcttgaactcctgacctcaggtgatctgcctgccttggcctcccaaagaggattacacgtgtgagccaccatgcccggtctttttcttttctttttagtaacagctgcaggaaagatttggttttaaaaaaattgttttgagatagggtctcgctcggttgccaaggctagagtgcagtggtgtgctcttggctcactgcagcctcaacctcctgggctcaagcgatcctcacatctcagcctctcaaagtgctgggattacaggtgtgagccaccgcgctcagccaacaggaaaaatttgggtttcctgtctgttctccaccctgtgctggcgtcagccacctctgtcctttgcacctgagcttccctcagatccccttcccctctttatccgtggctctctgggccttgccctcgtgggacataattcaccttcatgctgttcagtcagagcggtgcgggtgctgcctgggtcagggacgaggcaagcccctgacatagccttggggcatccatcatgttggtgggaaggccaggaggggccctggctgcatgctctgggtggggctgatggggtcagcctggccctgagagagggtgcgtcttcctgctggtggcagtgcggggctgatttggaaactgaggtatccaagccaccctgggcctagccagacccctcttcacagtagaaggacgtcagtgaggccagctcgcaggtcctctctgtctggcctgctccagggaggtcacccagtggccaacagtgggtcttccaggccgctgccaccagggactaaaaggccttaacttcccctagcctgccccaaccaagcacctccagtctctcacatgcagggcccgttcttctcgccgttctgcttctgcaccctctggttgaagctgctctcccgccagaggtgtgcccagttcaaggccgcccttccccagggctgatggttttgttttcctcaccatactttctcatagacccagccgtgtaagtcgagcactgcagcagaggcgcctcgacaccctggcgtcctgtctgaattttggacccagtggtgggaactgctgagggggctgtctccccacttccagtgtggatccttccaatttggggaaggccatggggacccagtctacatcagagctgtccttgcagaaggctccggggtcccgaacctcggcctcactgttggtcttacttgtttttgagcctctgcctcctacacctccatatatatatatatatttttttttttttttttttttagacggagtctcactctgtcgcccaggctggagtgtgatggcatgatctcagctcactgcaacctccgcctcccattcaagagattctcctcctacctcagcctcttgagtagctgggattataggcacccgccaccacgcccggctaacttatttatttatttatttagagacagagtctcactctgtcacccaggctggagtgccgtgacacgatcttggctcactgcaacctccggcttccgggttctcctgccttagcctccggagtagctgggattacaggcacacgccaccaagcccagctattttattttttattttttatttttagcagagatggggtttcaccatattggcgaggatggtctcgatctcctgacctcgtgatccgcctgccttggactcccaaagtgctgggattacaggcgtgagccaccgtgcctgacccatctttttgtttaatatctctctttctctctttcccctttgctggctgtgaaatccctcaagggcaaggatcatgactaattcgtcttaagtcatccttagtccagcacccagcacaggcaccttctcagcatttattgaataaataaatggaacctttcctccctggccttttcatagcattagctgcccagtttcggaacttcatgccttgaaattttagtactggggtacaaatccattttcctcacatgcctctgaattctctcactcatctttgaatgatatcataatgatgatgatgacggtgacaacagctggcacttacgcctctgtcaagcatcctgggtctacgtgctttccttttcaaatccacagcaatggcgagagggatgaactactgtccccattttacagatgaggacaccaaggcctggaggaagcttcactcatcttcccaaggtcctacgctgtcagcagcagagctggtgttactgcctggggccacctcatttctggcaccgaacttccctgcccaacgcagtcaggtgttggacctgtgtttgctggatgggctgggatcattgaggcccctgctgctgccttccagaagctgggatctcctgcctgctgtttaaccccccttgttccaccccacacagggacaaagggtggggctgagtcaaccgggccaggccagaagctgctggaatgtcacgctggggctctagccgccagccccgggagttggctgatgtgcaggacgggttcctggggctgcaaatccctgggcgaacctctccctgggtctgcagcgcctggcagctcctggcttatagaaagggggtgtatttagtttatcctgcctagcacgaagcacaagcaattcaagggcaaatgtatgacaagggctatgccatcctgaagatgagaaggggagcacagaagaaggggcagggggcatggaggggagagatgctcaccccataacagcagcctgctctcaaacagccttagggacagaccaccatgccccttgccccctctcctccctcctccctgtgcctggttactgatcctgtcctctgctctctggccctggccctgctccgagtcctggtttctcacagggccctggcttggtccttccttttatgctcaggtcttgattccaccagtgtggaccaagtcacagcccacaaacttggaacaccagagtcccacgctgggcctcccaggaaacactgagaatcaacagagccagagtcaggggccaacattccacagcctggcaccccaactggccaacttgggtggaataaacaggtgcaggccctggttgggagaagcacgtagtggtctcctggccaactcagcagccggcaccagagggccagggagggaccatctggagtggggagagagccagccccgcatgcatcctccggccacacagcagatctgagcagctagatgtattcgctatatgcaactgcgattattagcatgtgattaaggcaggagcggtggtaatgtcttccaggagctactagaattattaactctctgctattgggatgattagtgcccagctacctcgaagtattaacaattcatcactgggatgtttccatattccccattagaagtactagctaccgagatgcctggtggcgtcccattatgattgttatttgctatttgggctagagcaacaaaatcttgttttccttctcaattttaatcacctaaccgcggatccatgggatacagagaacaggcctcctgctcttgctgactctggcacctctgattaacttggaaacctagcaacgcagggagctggcagtggctgcaagctcctgagagtaagcagagcccagcaagcgggtgtcaggatgggtgaaaccggagcagtggggagcagccccccgactgacttatctgtcactcatctcctgatggctttggaagttcttgtgattcaatttcaggcttgacaggagaggctggtacgattatagcagccactgagacagccatgatggcagagacagggcttcgagaggcagccagggtcttcttagttatggggcacccatcagtggggtcgtgtggaggattcggtgtgtgacccacgtgagccacgtgctcaggcttccggcttcctgagcaatcctcaacccaagctggtcctcagttagcactaacagccgttctctgggggcctcctgggggttacttagctaggagtccagctctaggagccccccaacccagtttcccactcctcaacagggccaggtgacttcacctgtagtagcacaagcgccttctcaggcggaggacagaggcaagtgccccaagtggagggacccaggaagaagggagataatgagctgtggggtctcagcccagcagggcggggcgcacctgaaggtctggcctcgatgacgtagcgggtgatgggccctttgcccgggtctccgctggaccagtgaatggcgatggcagagctgtaccgcacgatgatgggcacgccaggcggtcctggggcacctgcagacagcacacagaggcgagggatgtatggaacccagaacagccacccagcccgtcaccctgggctcgaggaggaacactgggtgacaaaaccaaccctggacagagagccgccaggaagccctgcaaatgtcgcggcctgagagtacatctcaggctgggcctgccaggatggactgttgtccccctgggctacccctatgctccatattccaaatcccagggcagaagacaaatggaatggtccagaaaggtccctggagtagagccaggagacctgggttccagcccagaacgtgttagatgggtgattttgatcaattcacatagccttccagtgcctccgtttccccctctataagggccttttggaaggtaaggcttgaaggctgtgtcctggatggtggggaatagaggtgggtgcgatgatggcagagtgggcccatgagaggagggggttggtcggagcggggctgaagagtccagtttctccctcctggtaggtgatatgatgtccgccctccctcattcctgcctaaaatcccccaaccccaactgcatttcctattaggttagacaaggggagagggggtttatgccccaggaggccttggggcctgtgctgctaggaggagggaggaaggactgggccccatgccgcgctcctggaatgaaggtacgtcaggagcagcctgggatgtgggccagtgagggagccggccctaggagctggagcagatgagaggaggtgactccagcaatgagaggagtgagccaggtatctgtctgcaaggggctctgagccccttctcttgggggtgcccgtccagaatcccgaccccacatgctgtcacctccaatcctgctccccaccaaaggtggggctctgtacccccagagctgggtacacagtaggtgcttcctctgtgcttaggggatgagggagggaaccagtgcatgagtgggtggccacctggtttgttggtggggggtctctgtggagcagagtctagcatcacactgatgctcccccagggccctggagggccagcaggccctccttacacagcctggcaaccccacccggccactatgcccaccccatcgctcacacagcctggcagccccgcctggcccctatgcccaccccacagcattggagggcaccatttccttccttccctatggagcagcctgtctgcagcacaagggcagagtaactgcggggtcaggtggggtggacacgcctgagggagtatggtagggcaggcagccctcaggaccctgtactcatcctgcacaggacagtactcagggctgaggacagagcctgcaccttctccggggccaggagcttccagcgagtccagccactgcctggctgcatgttccccgcctgcagaccgccccctgcacccacaccatgtgggaggatggcttctttatttctttttttgagacacgttctcactctgttgcccaggcgggagtgcaggggcacgatcacagctcactgcagcctccacctcctgggctcaaacgattctcccacgacagcctcctgagtagctgggacttcaggtattcaccagtatgcctggataattttatttttgtagagatggggttttgctgtattgcccaggctggtcttgaactcctgggctcaggcaatccacccgcctccacctcccaaaatgttgggattacaggcgtgaacccccacacccggctggttctttctttctcagagtgccctccactaccttctctgaaccctctgccctttatctcctcccacctccccacctctcagcctgggacacttcaagcctcaggatagaacagcctgtcctccgcacagccctctcctgtccccaggccactgccaacgcttggtcctcagttgcttgccagctctctctcctacttttgtttcccaggaagctggctcaggtgagaggcagcgcggggcggggctggaggcagatgaaaggacagcggctgggtggctcctgggctgcctcctgcaggctttgtcctgagtttgccctagagctacagggcttctttgcagaaccagactgtggggaatagaaagtgactggccagaaagaaaaagtgaagcgcagccagactaagccattaggggaagactctcttcctgagtcaggctaattgggactgctggggaggggaggcctgcgccattcttggctgaagggggtgggcagaggaggagatgggattttaggggaagtccaggatgggctgtaccccttcttagggagggaggcagcagagtggtctgggaggtgacttttgtgttcaggacaggacattctacactgaccagtaacagggactttggagggctaaaccttgaccatggcaaatgcctggggggatgaggggtgggaggggaagggaggtgaagaggacatttaaaggaggcgattgggcacagtggctcatgcctgtaatcccagcactttgggagactgcagcaggtggatcacttgaggtcaggagttggagaccagcctggccaaaccctgtctctactaaaaatacaaaaattagctggtcgtggtagaaatcacctgtaatcccagctacttgggaggctgaagcttgagaattgcttgaacccgggaggtggaggttgcagtgaactgagattgcaccactgcactccagcctggatgacagagcgagactctgtctccagaaaaaaaaaaaaaaagcccaaacaacaacaacagaaacaatacaggagattaaggaagacttcctggggtgaggggcgggcagttacacacaaaagggcgttctgcggagggggtgggtggtgaggtgggggaggcagggccctggctgtgaataggtgacctgctccatcaggtgtttctcaaggtgccactttgtcacggcctccaggggcttttgtctaagtgcagactgccaggtcccacctcagccccaggaaatcaacccctcggagcatccaccctgggaacgtgcattttagtgcgccctgctctgagaaccgctgcctggagggtaggggtggttcaggggcgtgggaagatggctctggctgggcgaaaggcaggggcacctgccaggctgcatccttccaggacggaagtaaaggaggccatgcaattagcagggagagaaagaacgaagcaggcgcagtggccaggccaggcctgtgggctgggcctaagtgggagaggagggggcgctgctccagggtttgtggcttgaggaacctgaggacacattaatcaaagcgtggagcccgggaggagggagcggggggaggggtcactgggcaccaggggaaagagtgagctctgtcctccactctgtttccagggtccagcacagctcttgacaccgggggccccttctgactggggacgctgaaccgccgtgtggaagacatgcctggtccgttgctctcctaccttctccggggcccgtggtgacgttggcttcgatctccggcccgtaggtgaaggtcttggctctgatgcggaacctgtaggtcaccccctccgccaggtccttcaccttcagccacagggggctgttccccttcacgtccacggtcacgatcttgctgactcctgggggaggcacagcaagtggggactgggcacagggcccaccgagggcactggaggccatggggaaggggaagcggccgtggcctgggccccgggaccctgggtaggggcctcactccttgaggtcaggctgaaatgcacccccagcccacacaaccacattgcccatgctgtgtttctcacagcacggtcctgcctgctgttctcagggagaacggctccatggttcagtatgtttgggaaaagctactactgtctgtgtctactgagtagccacagggtccatcatcagcatctacagaaaagagaacactcgccatcctgtttaatgtaacctctgcaccccaaatatgtttcggctccattgctattcccttatgcagcatcccatgggactagaattatatcctttttcaggaagtgcttccataaaaataccaaaagcccagagttgcggggacacacttttgaccaggtcctccacctgagccccactccagctccacctctggggttcagccaggagctcacatggccctccagcacctatatctgccacaattttttttttttttttaagacaaggtcttgctctgttgctcaggcacaatcatggctcactgtagcctcgacctcctgggttcaagccgtcctgccactttcagccttccaagtagctaagactgtaggtgtgcaccatcatgcctggctaatttttaaatttttgtagagacagggtctcattatgttgcccaggctggtcgcgaactcctggcctcaagtgatcctcccaccttggcctctcaaagtgctgggattataggcatgaaccactatgcccagtccaccaagctttttagggcaaaagtgaggatgcctcagcaccccaaatcacagcaactagaggggacgcttgagccagctttcaggaggtgggggtttgcactctgtgcttcgcgaatccaaatactcctgactgccagcctccctgggagccggggttagtgtcatttcccatgtccatcgagcacgccagtcaccagtgaaagacaggccttgcagccaataggctgggctcagacccagtgatggcgccggccccggcatgtcccttaacttggcttcagtttgttctgccgagtgagggtgtccacagcatcttaggcagggatgctatgagctttaagtaaaataacagagcatgtaggtgcctgacctatttattgactaagtggattactaatattatcgttttgaggtggattttcactattgttgcccaggctggagtgcaatggcgcgatctcagctcactgaaacctccgcctcctgggttcaagcgattctcctgcctcagcctcccgagtaggcgtccactaccacacccagctaattttgtatttttagtagagacaggattttgccacgttggtcaggctggtctcgaactcctgaactcaggtgatccaccgcctcggcctcccgaagtgctgggattgcaggtgtgagccactgcacccggccgctaagtggattactaaatgatggaacaatgtaggctcagaggggcttcctgaaagaatgaaatgaccctgggaccaggaacagggactctggctacctgctccttgacaattctgaacaaagccctcatctgcctggaccttggttttccctacaggacagtgggggctgctgggcttttgtgaggctggtttgctattgacctgaacccaggatgaactggggtgtggacactgggctgtccaggcggggccttgtcttgctgtacttattaactgaactattatgggaagatgggaatgtgtaggggtgtggagttgagccacacagtccagatcccaccagactgtggaattggaaggcaaagagctcacatcctcaagttgagagggtcctggacaggccaggttgaggcccctgtgaagagggcttgtgctggccccctgtaccttgtctcggggactgctgtcctctgccccactccggccctgcacctgactggatctcctgctggggcctggctcccccctggtgttctaacacacagctcccctttgcagaacgagctgctggcacccaggtggtagcagggaagactgagggccattgttccctaggctcaccgagaactgctggtcacaacgatgttcccaggtctctgccccttgttcttgccaggctccgtgattggagggggtgagagtgagaggggtggctccagaggtcagccacacccccagcacctggctgggactagtcccaggcagtgaggaacgcagtttccttcctgcctaaatcccatcctcataggatggttgttcataacaaaatggcagggatttcttggcatgttaccaggggtagaaagctggcaggtaccagatgcccattgtcaggggctgcgcagcccagcctaggagcccagaaatgggcaggttcccagctggggcccggaggaaggggtcagaagaccagtcagatgaacagggttaaggacaagagcgaggtcatttgcagagcagggctcttgatctggggtccgcagatagcagtggggggtgcagggacctccttggtcttgtgtatcttcctggggagaggctctgaagctttggtcagattctcatcagattctccaaggggttcctgactcccaccaaagctaaagaaggactaacccacagtaaagctgagaaccctaaggtttgggaaagggcaaagtaggaccctcaggggctcccctcttctttttcttttcttttttccttttgagatggaatctagctctgtcgcccaggctggagtgcagtggcgtgatcccggcttactgcaacctctgcctgccgggttcaagcgattctcctgcctcagcttcccgagtagctgagactacaggtacccaccaccacacccggctaatttttgtattttcagtagagacggggtttcaccatgttggccaggctggtcttggaactcctgacctcaggtgatccacccgcctcagcctcccaaagtgctgtcattacaggcgtgagccaccgtccttggctgccccccttctttatggtctcaacagagccctgtccactcaggtttcccttcctttcctccctgtttccgttgaccaaagggggaagaatatatttaacgattctctgcctggaagttaggagacctggatctctcttccaactctgccctcaacttgctgttgttttaccttggaaatgcactttcccttgtctgggactcagtttccgtgtttataagatggggagactctcaccgaatctcactcatgtgtagtggctgtgatgggcgctgagatgagagcgagcttttgcaaagtggggggctggggagctgtgctggggggtccactcaccatccacggggctgcagggctcgtacaccagcctgtagccctccaggatgccattggggaactgcggggcttcccaggacacattcactgaggttgtggtcagctcactgaacttgaccgagctgggagcgctgggggctgcgggagacagcaaagggtttttgtttccttcttctgtggaagttcaaagcctcgggttcagctccaaggagctagcgggagtattgggtctgagcccgggaggaacaagagcgtggggctcggcagaaagggcgggcaggaggggtcactggaggccatcaggcccccttcctctcctctctcaactttccagtatcagagtcctaagaactgggaagaaagagaactcgatttttccctcaagttgcagaattcaggcttctccctgctaagtggctctgagcccgggctatgagtgtgggacaagctgtcacacccccggggtcatcgtggggcaaggccatttcctggctttgcggggttcgtcttttggctttcgtggagaaggtgggggtgtctgggcctcagaatattcggtaggcgctaaacaaagaagacaccagaaccacagcagacggagatggccttcctctcctcctggggctccagggcttgtcacagaggccccacgcagtcagggggagccacgccaaggacagtcagaccctctgggagaaatgttttctcggaccaagaaccctgtggcaaccccaaaatcatgggggtgggggctcccctgatggggaggacagaggaagggcaggaagcgtcccaatctgcggcatccccagctggcccagggaggatgaccaggctattattgtccggcgctgcctccccaccacgctggagctaatccggacctgcttccggctccagccccaggaggcagagtcagcgagtgtctttgaaggagggaggtgagctcagggggcccttcctgcctcccctgtgctacagggacgtgggacagaacatgttgtcctgctgccgcagtgacggaagcctcgggttccctggggttcgcatctggcagatggcactgacaaaagagtggccgggacaggaggcggacggacagacttgtatattcagcagctcacgctcattctggccaccgtcagaccctgggggtagtggagggaaagggttccctggagccagggcttgtccccagagagggtcataatgaggaactgatgccacaggtgtgccctctgcagctctttaaaagccacatgtcactgacagcataggaagcagcaggttgaacaagatgctcaagggaggccggggcaaaaggccagtattccagtccacgaggacagaacacttggttctctcagaaatcctgggttccagcctctgctgccccagtgaccagctgggcaaccctggacaagtagtataacttcctgggtgaccccggctcatcgtgagatgagggtgctgcctgccctgcctgtccacggggcttctgggagggttaagtgtgacagtgcctgactaccaggctcgctctgcacacaggcagcaggattctcaccagcgccctctcctctgcacccgccacccttcagcctcccgatctcccctccctgcctctactctctcccctccaccaggccatcttctgcacagcagccggagcacttttctctaaatgtaaaccagaccctgttgctcaactgctcaagccctcccatggcttcccagcatactttttaaatttttttattttttaagacagattattgctctgtcacccaggctggagtgcagtggtacaatctcagctcactgcaacctccacctcccaggttcaagcgattctcctgcctcagcctcctgagtagctgggattggagaagggtgcaccaccatgcccagctaatttttgtagttttttaagtacagatagggtttcatcatgttggccaggctggtcttgaactcctgacctcaaatgatccacccacctcggcctcccaaagtgctgggattacaggtgtgagataccatgtgtggtccattgtacttataattaatcccaatcccaatcccccagcctgagctctcgccccattttcctgcaagccacctggctttctctgcgttcccgggttcctctccagcccctaggccttagcacctgcggttccctctgcctggagcccccagcaccctctgccacctcctgagagcatctcatggctggcctcttgtcttttttttttttgggacagagtcttactctgtcacccaggctagagtgcagcagtagcacaatctcggctcactgcaacctccacctcccgggttcaagtgattctcctgcctcagcctcccaagtagctgggattacaggcacgtaccaccatgcctggataattttttatatttttagtagagacagggtgtcaccatgttggccaggctggtcttaaactcctgacctcaggtgatccacctgccttggcttcccaaagtgctgggattacaggcgtgagccaccatgcctggcccctgccggcctcttctcattcaaatctcacctcctcagggagggctttgtgggtgagcctatccagagccatccacccactcctgcctcactcttaggtcacctgtgctgacccccgtctgcatttacttcatcaacttgcttatgatctgtcccccgcactagggtggggaccttgctggtctcactgttgtgtccctagcatctagcatggcacgggctcataagacactcagtatttgtggaatgaacaaagccagagagacagagggaaggcaggtgggaagaaggcagggagcagaagtaggctggctgggaggggctgggggtgctgactgtccgtctgcaaggcggggcaaacggtggggaggacagggatgaggtgtgggggtttctcaaggctttatggggacagcttctcttttctgagaatgggctctcccacttgggagggtgtctctggggacctgggtaccacgaccagatcctcaggcggataaggcagctgcccccatgcctgccaagagcccggatgccaggtaggtcctcttgcaaccccccgtggccgacctacccctcccctcctcagggccccctctcccacctgcttgctgggtctggccttgggtgggggtgctccgaggcccatccccagcggcgttgaaggcggccacgctgaccatgtaggccgtgtagccagtcaagttcttgagcttcacgctgttctcagccaggaaaagcgtcttcactcgctctgtgaggttcccccgctgggcttcccagaaataaatctgtgggaacagaaggatgtgggagtgagggggacaggggcaatgagagtccctcctgtccctgctgacctgtagtctcagagacaccttcattgctgtgagtcacctgggaaacagcggagaagtctttaagaggccgggtgcggtggctcacacctgtaatcccagcactttgggaggcagaggtgggtggatcacttgaggccaggagttcaagactagcctggccaacatggtgaatccccgtttctactggaaatacaaaaaaatcagccgggcatggtggcaagtgcctgtagtcccagctactctggaggctgaggcaggaaaatcacttgaacctgggaggtggaggttgcagtgagctgagatcacgccactgtactccagcctgggtgacagagcaagactccatctcaaaaaaaaaaaaaaagaatttaagaactgttttagaaacctttctggaaccttccttttcacagccaagaccctggtctctgccagacagtaaactccagggcatggcccccaagtgtctgtgtttcccgccatgcctggaggatttaccatagcgctggcacatcagcacttagtacagttcctggaggaataaagcaaatccgtcctacgggaggctgagctggggagataaggcagtgtggagtctatccagacagagtgtggtgcaagtgctggtggcctcatgtcacctgggagctggtgagggatgcagagtctcagggccaccccgggcccgctgcaccagcagctgctggttaacaggaacaaggcccgctgcagaggaaggcctcggccaagacggcgggcagcgggaggctgaatcccagctgcaccgcatacagcagcgggacctggccagctgacttcccagagctgcagttttgtcgtacattcagtgaggttaaggacacgtacttcctggggtccgtgtgaggggtgcaggttctaagggtttcacccaggtacttggccagtttcctaaggaaccccgtggctgcagaaggctttaggccaggaacacaacagatgctccctggtgttttctcttcctttctgttttttgagatggagtctcgcactgtcacacaggctggagtgctgtggtgcgatcttgctccgcctcacgggttcacgccattctcctgcctcagcctcccgagtagctgggacacaggcacccgccaccacgcccggctaatttttggatttttagtagagacgggatttcaccgtgttagccaggatggtctagatctcctgaccttgtgatccgcccgcctcggcctcccaaagtgctggggttacaggcgcgaaccaccaagcccagccattgttttcaatcatttcctctgtagcacaggttaacacttctgctagttccaggactgaggccatccagatagcggccagctgggcccagccacgtgcaaaattggaggtcatttggcgccccctgctggccaatgaggtttctgcatgtcaccggcttttcaatttctcatttccctggaggaagcccataaagtgagaaagagctaataaaagtgtccccactggcatgtatgggtggcagttaggacatcttgttaccatgaaatccttgcttttctccaatccctctccccctttattattatttttttatttgagacaggcctcactctgttgcccaggctggagtgcagtggcacgatcacagctcactgcagcctcaaccacctgggctcaagccatcctcccacctcagcctcctgagtggccaggactacaggtgtgcaccaccacacccagctaagtttttaattttttgtagagacggggtcttgccatgtttcccaggctggtcttgaactcctgggctcaagcgatccaaccaccttggcttcccaaagtgctgagattacaggtgtgagccactgtgcccggccctctctcccattttattttattttattttatttcaagacagggtctcattttgtcacgcagactggggtgcagtggcatgatcttggctcactgtaaccttgacctccaggttcaagcaatcctcccgcctcagccccccaggtagctctgactacatgagtgctaccacacctggctatttctttcgtagagatggggatttcttttgtagtgatttcttttttagaaagggggagagggccgggtgcagcggctcacacctgtaatcctagcacttgggaagctgagagaggggaatcgcctgtgcccatgagttcaagaccagcctgggcaacatggcaagacccctgtctctactaaaaacacaaaaattagccaggagtggtggtgtgcacctgcagttccagctacttgggaggctgaggcaggaggatggctggaacccgggaggtgaaggttgcagtgagctgagatcacaccactgcactccagcctgggcaacagaacaagactccatctctaaaataacataaaaataacgaaaagcagattcttctcatatggatagatgaatgaaagcagaggcagtcatgtatgaaatcattcattcactcatgcattcatactaatgggggtacaacagttaacaaagttcctgttggatttggaaaggtcatggctgatgctaaaagtttgccattattagcacacaggtggtcttccgtgagtgcacactgggagaatgaatggattctcttaggtagagaagagggctgtggattgatccctgggggcctccagcattcagtggttggtggggaggaagagctagcgagggaagctgaggaaagcaagcattttgagaggaaggagagatccatgtgtcaaacacagctgctgagtcaggcaggataagcctgtggtttgactcgatatgagcaacatgggaattattaacaactttggcaggaagagcttcggtggggtggcggggatgagaacctatttggagcgagttcaagggagaaagagagcagaggaatcggagggagtgagtacagaagattcttttgaggaattctgctgtaaaggggccaaagaaatgggtgacaactggaagaaaatgtgaggtcaggccaggtgcggtggctcacacctgtaatcccagcactttggaaggctgaggcaggtggatcacctgaggtcaggagtttgagaccagcctggccaacatggcgaaactctatctctactaaaaatacaaaaattagccgggcatggtggcggatgcctgtaatcccagctactcaggaggctgaggcaggagaatcacttgaacccgagaggtggaggctgcagtgagctgagatagcaccactgcactccagcctgggcaacggagcgagagtccgttaaaaaaaaaaaaaagtgaggtcaggaaaaggcataaaaagaggaaacatatctcagaatgcttttctgccctgcccgtgggagctatccactggggaggtggaggagaggaagggccaatggctgcagtcatgctcttgggtgaggagtgggtcggggcctagaacccagggacagctgtcttcacaaaccaggcactccggcaggtgcatcttgtttgtgagcgctgcattctgcggacctttgttagctgatgattcacagtgagagggactgacacgcgtgcaaaggacataaagggactgagcccagatcctggttcccatggggcacactgctgagctgcatggggcacattgatgggtaaccaggagtctgccagaatgcaggctccagcgggcaggcatctcggtccatgtggcccccttgggacccaaacacctagaatcatggctggcacatccatggtcctcaatcaatatctgctggatgaataaatgccttatgtggacaggggcaagcatgggagtgcaccattataatcacgaacctgccatttactatgcccaattctctgccctttcatttcttttttcagctttattgaggtataattgacaatctaagatctatatatagccgggcatggtggtgggtgcctgtaatcccagctactcgggaggctgagacaggacaatcccttgaacctaggaggcagaggttgcagtgagtggagatcacaccactgcactccagcctgggtgacagagtgagactctgtctcgaaaaaaacaaacaaacaaaaaaatcaaaaaacaaaaaaaccccaaaaaactgtatgtgtttaaggtatacaacatggtgttctgatatacacatgcattatgaaatgattaccacaatcaagctaattaacatgttcatcatctttttgtggtgagaaccttctgagcaaatttcaagtgtacaatacggtatcattaactatcatcaccatgttgtacattagatctagatcgtattcagcctgcttcaccgaaacgctgtatcctgggaccttctccctatttccctcactccctcagcctctggcaaccgctgttctactctctgttcctatgagtttgattattttagattccacatatacgcgaggtcatgcagtatttgtctttctgtgcttggtacatttcatttggcataatatcctgcaggttcatccgtgttgttgcaaacagcaggatttccttcaaggctggatggtattccactgtgtataaaccacattttcttcattcattcatccattcacagacactcaggctatttccacatcttggctactgtgaatgatgctgaaattaacatgggcctgcagatagctcttcaagagcctcatttcaattcctttggataaatacccagtagtgggattgctggatcattggagttctatttttaattttctgcggaacttccataccgttatccataatggctgtactgatatacgttcccaccaacagcgtgcaaaggttcccttttccccatacgcttaccaccacttatctctagactttttgataacagccatccttgcaggtgtgatgggatatctcactgtggttttgatttgcatttccctgatgctgagcgatgttgaacaccttcttagatacctgttgaccatttatatatcttcttttttctttttttttgagttggagtcttgctctgtcacccaggctagactgcagtggcatgatatgggttcactgcaacctccacctcctgggttcaagcgattctcctgcctcagccaggtgcctgccgccatggccagctaatttttgtatttttagtagagacggggtttcaccatgttggccaggctggtctcgaactactgacctcaggtgatctgcctaccttggcttcccaaagtgctgggattacaggcatgagccaccgtgcccagcctatgtatcttcttttgagaaatgtccatttgggtcctttgccccattttctttcacttttgttgtatgagttccttacatattttggctactaacccctggtcatatgtatggtttgcaaatatttctcccattccagaggttctccctccttctggaagcatgttcttcccatgagctctgagacatcactcagtttttggtttcagggctcaatttgtagacttcttttgttctttatctttccttgtctaatctctagctttcagtaccatctatatgccgaggactctataattcacatctctggtttgatccttctctcttgaactccagacatgcatctctgactctgttctgtctcccctcgaatgtccaacagacgtctcaaaccaaacacatctggaaccagactccagatttccctagcctcctccttcaccagctttgtcttttcctgctccatcatcctgtggaccctggggctgtccttgttgcctcccttttctcccattccatgttcgatttgtcggtaattttttttttttttgagatggggtctcgctctgttgcccaggctggagtacagtggcgtgatcttggtgcactgcaacctctgccttctgggttcaagggattcttttgcctcagcctccccagtagctggaattacaagcatgcgctaccatacccagctaatttttgtatttttagtagagatgcggtttcgtcatgttggccaggctggtctcgaactcctgacctcaagtgatctgcccgccttgggctcccaaagtgctgggattacaggtgtgagccactgtgcccagcctgatttgttagcaaattctaccagctctgctgttgggactaactgagagtggccacttctcactctgctctcacctgatctgagcccccttcatggcccacccggatagttcagatgcctccccatagcttctgggctttccccatttcagactctgctcagcacagcagccagcgggaccctctgaaggtcccagtcctccactcagaggacttcactcaagagtgacagccaaagccccgaaggaccccaggtgctccagccccggctttcccatctcccattgcgctccctggaactcactctggggacacacaaggctctccgtataccccaagtacctgtctaccctgagacctttgctcttttttcctctctttctggatccatgtgatttgtgccctgttctccttcaggtttttgctcaaatatcaccttctcattaagtcctttcctaacaacctttttttttttttttttttttttttttttttgagacagtcttgatctgttgcccaggctggagtgcagtggtgcaacaatggctcactgcaccctcactcggccgggctcaggcactcctcccacctcccaccccgttggctgggactacaggcatgtgccaccacacccggctaattttgttgttgttttctttttgtagagacaggcttttaccatgttgcccaggctggtcttggactcctggagtcaagcaatccacccacctcggcctttcaaagcgccaggattacagttgtgagccactgagcccagcccttaacaacccatttaaaatttcaaaccctggctgggcacagtggctcacgcctgtaatctcagcaatttgggagaccgagggcggatcacctggggtcaggagctcgagacaagcttggccaacatggtgaaaccctgtctctactaaaaatacaaaaattagctgggcatggtggcaggcacctgtaatcccagctactcaggaggctgaggtgggagaatcacttgaacctgggaggcagaggttgcagtgagccaagatcgcaccactgcacttcagcctgggtgacagaacaagactccatctcaggaaaaaaaagaaagaaagaaataaaataaactaaactaaaataaaataaaatttcaggctggatgcgctggctcactcctgtaatcccagcactttgggaggccgaggtgggtggatcacgaagtcaagagattgagaccatcctggccaacatggtgaaaccccgtctctactaaaaacacaaaaattagctgggcatggtggcaggcacctgtaatcccagctacttgggaggcggaggaaggagaatcgcttgaacctgggaggtgggggttgcagtgagctgagattgcaccactgcacttcagcctggcggcagagcaagactccgtgtcaaaaaaaaaaaaaaaaattcaaacctcctcatggacctggctctcccctaacctgcttcatttaccaccacctggcggtattatttattttgccccgtgttggccttccctccctaacatctaagctcacaatgctgggcacacaataactgctcaataaacacgtgtcattgaccaactgaaagactggagctctcagaacgtgcatgaatgtgcctgccacgcaccagttgggtgcagtctgactggaatgcagtatcagcttcggtgtgctcatgggttgatgaagttaatgcgtcactgatgttcgtgcgtgttgatgtcagtaccttggttatcacaggtccaggaggtagcactttctccgttcacatccacagttgccgctcaggtacgggtcatgttttctggagcatgtaggcctctgctgtattctgtatggtgttgtgcacctgcacattttcctgggtctgtctattaactcaccacttacaagcctcgacagtctggtggctgccacactgctgctggcgctgccctggcccctttcttttcccatgggaggcatatgctaggggggcaatatttagttttcccagctggtgctcctgggcaatgccttgaggggtgtcatccatctttagggcttccttggcaacatgcctttcctccttccttcctcctccttcaccccagatggaatgagactcttatgctggattccatcctaaatcgggactacctgtattaatgagctgtgtgacttgggtaagctcttcccctttgctgacactcctcccacctgtgggatgaggtgccttgtgtctctcctactccccacctgtgggatgaggtgccttgcgtctctcctactccccacttaagccatggcactggggctcttctctggagtaacaaccagccgccaagaatgagagtcaactggacactggtgcgggaggcagacacagctaagggttatgtgttccagctcttccaaccagacagacacattccttttttttttttctttttttttttttggagacagagtcttgctctgttgtccaggctggagtgcagtgacacggtcttggctcactgcaacctctgtctcctgggttcaaacgattctcctgcctcagcctcccaaatagctgggattacaggcacccgccaccacgcctggataatttttgtatttttagtagagatggggtttcaccatgttggtcaggctggtctcgatctcctgacctcaggtgatccatctgcctcggcctcccaaagtgctgggattacatgtgtaggccaccacacctggcccatgttcctttttaaatctacttcccctagtgctcatgtggttggttagtgcttacttttcacccctcggggggtgagagctgccagacttggaatctgactctgctgcctgctttttttttttttttgagacctcttggctggagtgcaatggtgcaatctcggctcactgcaacctccctctcccaagttcaagtgattctcctgcctcagcctcccgagtagctgggattacaggcatgcgccaccacacccggctaattttgtatttttagtagagatggggtttcaccatgttggtcaggctggtctcgaactcccgacctcaggtgatctgcccgccttggcctcccaaagtgttgggattacaggtgtgagccaccgcacccggcctgcctgctgtttttgtgatcttaccaggtcaactaaattggaactcagtttcctcatttgggcataaaaacccatatcctcccagcttcgtgggcctttcatgaagattcaagagttccaaagggctttgtgaatattagggagaaattgaatccccttatagcacaggacatcatcctaaatctagaaatgatttttttcttttttgagacagtgtcttgctctgttacctggctggagtgcaatggctccacatggcctactgcaaactctgcccccctggctcaagcaatcctcccacctcagcctcccaagtagctgggactataggcgcatgccaccacacctggctaatttctgtatttttttttgtagagtcaggttctcactatgttgcccaggctgttctgtaactcctgagctcaagtgatccgcccaccttggcctcctaaagtgcgggaattacaggtgtgagccaccacacacagccctagaaatgatttttaattttaatttttttttttttgagacagagtctcactctattgctcaggctggagtgcagtggtacaatctcggctcactgcaacctctgcctcctgggttcaagcgattctcctgcctcagcctctcgaatagctgggattaccggtgcctgccaccatgcccggctaatttttgtatttttagtagagatggggtttcaccatgttggccaggctggtctcgaactcctgacctcaggtgatctgcccgcctcggcctcccaaagcgctgggattaaaggtgtgagccaccgcgcccagcctagaaatgatttttaaacagagatttccaaatactaggcagtgatgctttgctaactggctatctgattaatatcaatattgtaattatggggccaaaagccccttggagggtcttaagttatgtatggggttgggggctggtggggagggatgtgtgtgctgctcagagatggtacgagcctagggatggctagagtttcttgcacctaagctcagcctgccctcaggaagctggaggggatggatgtggttcagcttcagctgtacaaatatttctgcgaactgggtccaaacagccaaggtggcaggtgtaccacagagcctgaagggccgaggagctggctggatgaatggagggcctggggacctgcctgcctcccacatatcactcactccccagcctccgacctggcttctcatccgtgcacccctttgctctgcccgagggcaccctaccttgtacccctggatgtctccattctggctgtccagcggaggtggctcccaagtcacgtccagctgtgtggccgtggcgccgtggacgaccacgttacgaggtgctgctgtgggcactggagggcgtgcagggtaggcagtgagcatgcgagtaaacctgggaggggaggtgggctgggcgggatggggagcccagatcccgtttcttccagctgaactgggtggggctgggaaaggcatgctggggccggacagggcgggcgctgctcacctgcctccccaacaaagacctcctgcggggggctggagggcccctcacccacagcgttgtacacgctcatccgtatctcgtaccgcctgtgcttgttcaggtctgtgggggagagtgggggaggggaagcacactgaggtcaccgtcattgctgggaaggtgtccccagggagggtggaggctgcagggggaggaatgaggcacccccgccattctagccccctctgtgaaggtgcatgaaggaggaggtgagaggcggggcccccaggggacgctctgtgccaatctggacatagggcaatgctggttggcctcttggcctagggtggccgtacattttattgttcaactggacacttttgagactgaaaccactatgaatatttacaccgggacaaccagtgtaaaccaaagctgtcctgggcatgcctggacatagggtcaccccctacccccagcctgtcctctttccccaccgtgacagatgcccagagtccccatccaccaactctttacacagcggggctcagctccaggggggaggggcgcattggatgtgaattctggactaagaaacctgatgtttctgccaagtttgaggtgcttggctgagaatgcctggcagaacttgggaatgggacgcagctgcaagaaacgggcgcagtcactgtcccccgtagctgaaagtttctcccaccctctccactcttctctctgggttccctgcccctgcttccttcccctgggtaggtctaccctttaacagggttgtgagaggggtgtcacccttgcctagctgtctatgcagcctgggttggtcattggttgacggaggaaggaggaagagaatttagccttaaactagtgctattttctcctgagcacgaaaccctcttgcctaaggccctgggtttcaggaagaaccacggctgatgctttagagaaagatcaagggttggggcatgcaagcagcaggaacatgtctggtgcacgggaggacgacggacgcaggtgactaaaactgctgtcacctccctccaggtgtggggccagactgtaagacccagctgggccgagaagtgccttcgatgggactagatggggcagcaaccacgtggacacctgcccacctacccagcagcgtccaacagcttctgctgcggccccgctgtcactgtcccccgacccagccgagcacagggttacagacttcccttttccagcccacacccaacagagggcaggcttgaaggagactttccctgtcatcggcctacttttccgtgtgtttagggttatcacttgtgttcagggtagtcccgtttcttaagccccctggggtgggcacaccccctcaacctgtgatcaggtctctcaaggaggccccactcccaatcccctgcgaggcctgggcccgcgatgaagccaccatgcaaggagacttactgtccagctcgtactgcgtgaggctgggccggctcaggttccgcatggagtacatggctatggggtgggggtgccggggcgggggcgcagagggagacagcagacagaggaggttagtgctcacacatccccaccccacaaagaaaccccggccaggcggggctgacggcgtgaacagacaggaagagtgtttccaaatttccaatgctgagttacgggccaggataacagggttgtgggggcaggggaaggtggaggctccctggacagtctgccccaccctggtgtgcactggcccaaggtgatgtgagctctttgtagcccagcatctctagggacatctctgggggaccctctcaccccaattctcttccttgtttcagggcagagctcctggaaaccagcatgaaatactggagtcgttaatttcctcatatgaaccagaaacaattttactactaggaaatatgactgtattatacacaggcaatataaaatcacaaccacaagcacatatgggcaaaaaaaaaaagaaggaaaaaaagtccaccaaaaacgcaagctgttggatcagctacttcagagtttttctattaatattcctttgctacatgctcatcattttgttgtctgctaactcactagaagacaaggcacaaaaggcttgagagaactaagggaggaaacgtgaaaatgaagaggctgggccgggcgcagtggctcatgcctgtaatctcagcactttgggaagccaaggtgggtggatcacctgaggtcaggagttcgagaccacctgaggtcaggagttcgagacgagcctggccaacacagtgaaacccggtctctactaaaaacacaaaaattagctgggcatagtggtgcacgcctgtaggtccagctacttgggaggctggggcaggagaatcgcttgaacctgggcagcagagctgagatcatgccactgtactctagcctgggtgacagagcaagactctgtctcaaaaaacaaaaaacaaaaaaacaaaaaacaaaaaacaaaagccgggcgcagtgactcatgcctgtaatcccagcacttcggaaggccgaggcaggtggatcacctgaggtcaggagttcgagaccagcctggctaacatggtgaaaccccgtttctactaaaattacaaaaaattagctgggcgtggtagtgtgcgccgttaatcccagctactcaggaggcctcaggcaggagaatcgcttgaacctgggaggcggaggttgcagtgagctaagatggtgccattgcactccagcttaggcaacaagagtgaaaactccatttcaaaaaaaaaaaaaaaaagaagaggctcttaaactgacccctctcctgctagtctgtttgggtgagtgtcccacacccacctgagtacccagtcctctggggtacccctgcctgctgccgtcttctactacgaatcagtcatggagtcccaggtgggtggatagaggatatttagggaaggaggctctttataaaaatctctagtggtctgagtccaaatcttaggtgaacgcaagcacttcagacccaaacaagccaaaggtgtagatgaacatcagttttgagccactgggaaaacctcagttttttctttcgttatgtaccaaggtgttctaattatcgttgctacctgctgtgctgtaacgtgttttatcggttgcaccactttgcagcattttctccaaagcccttaactgtcgtaaatgcacctaactgtccgccaatgcggaatactaaataattatgatgcgagtggctgatttactttgaaaaatcaaaaacaggccaggtacagtggctcgcgcctgtaatcccagcactctgggaggccaaagcgggcaggccacttaaggtcaggagttcaagagcagcctggccgacatggtgaaaccccgtctctactaacaacaacaacaacaacgacaacaacaacaacgacaacattagctgggcgtggtggcacacgcctggagtcctagctacttgggaggctgagacacaagagtcacttgaacccaggaagcggaggttgcagtgagctgagatggcaccattacactccagcctgggcaacagagcgagactctgtctaaaaaaacccaaaaaacaaaaaaacctcaagtcctggagcatctgcgcccatcacatatcatctcccatactggcctcggtccaccccgagtctgtgcctcggttccaacctcctgctctcttgccacgtgactgcaacagcctctatctgggcgcctgcctctggctctccatcctcccaccatggccaagccatcatcctcatgccaccaaagtggctcctaacacaaaagtccaaacacgtctttcccttgccgtggtcttctgggcatcggctctccctgacatttccacctgggctcccctctttccttcctttgctccaggggacaggcagggcagtggcttcccccaggaaaaagagggggccaggactactgctctaggggtgtgaccaggtgaggcttctggtccctcaagggcagggtgctccttctcatgcaccgggctgtccccgtccctttgtcctggttaacttggcatcatccttccgtgttagcgccagtgctggtgccggggaagccttgcctgtccctggctttaggtcctcctagaatgtttccttcccagctcgcctggctcctcctccagcctgcaactccaagagggcagggaccctgtctgtcttgatcattggtgtgccccacagtgactcggggcccatagaaggtgctcagtaaatattcagtaaatgaatgaatgggatgggaggagggagaggcacacatggaggagggaggcaaggtttcaggttagagtggttccaggaagctgagagctccagagcgggaaggtgagggtgaccgcccccatcccacccattcctctggctcccaagtgtcactcacaggtaagctcagcccatgtggcccctgggttgttgatgcctcgaagcgtgaagcccctcagtccttcatagagcagctcccggtatcggatccggaagcccaggaggatgccattgatcttgtcctctgctggcggctgcaggaagggagtagggcatggggagggcacctggaccaccacccacccctccccacgctctctcatcatgcctcctgcagccacagagcagggactatgttttaaccaggaaaagaaatcaagataatattgggcattttaaatttacaaagcacttctgatgaggccatttcatccctgcagcattccctagaaggagggaagggcaggaatcagtaatcgccttttatccaagcaggaaactgaggctcagagatgttaaggaacttgcccaagatcacagagcatcattggggcctggagcacacagctgttttcctagagccgctccttgttcacctcctttgtcttcaagagctgccctcacctgatcaccagcctccccaggcctgctggtccctgccttagcatctggataacacttcctggtgtttcctgcaagctgagccctctcctactcttagtacatgcaagggtgagtgtgcccctcaccccttcatcaagttctcctttgcttcctctcccgtctacagcttagctgcagaaccggcttcgggagaaggtggaaactacttcttaatgatactgcttatgaagaatggtctgaccagcctggccaacatggcgaaaccccgtctctactaaaaatataaaaattagctgggtgtggtggcatgtgcctgtagtcttgcttggaaggctgaggaaagagaatcgtgtgaagctgggaggcggaggttgcagtgagccaagattgaaccactgtactccagcctgggcaacagcgcaagactgtgtctcaaaacaaaacaaaacaaaaaccccaaaaaaccaaaaacctgctgaaacagctcaggctttgttagctccttaatggtttccccggctgccatgggcacctccctgccccctccctctgccacgttgctccagcctcgtcccggtcacaggtgcactaagtcatgtttatctacgggagcgtcctctccttgagctgtgtgtctcaggctggggggaccctcctggctttgtcttcaagggctttccctttgtggagtggcagatggctgaaggggagtgcctgcccctttgatctggagaagtggtgatgggagttcagtgcttttaacttttagtagagatggggttttgccaggggtccctctcatgtgggtgacctgctgaggcaaggctgaacttcagagggcacaggagggctccgcggggcaggacccatgagcagcctggtcgctgaggtttgcccatggtcttccccaggccatggcagagcaggcagtgcccactgaagagtgggcatctggaaggggtatggacgaaggggggcatttctctctacttgcacagtgatgatgacgggcataggtctctgcaaggaatcccttcaccgaccagtggggcttcatggagactctgggggccctgagagccacaagcacttttcagcccaaggactcagcaggcctaaggctaatacacctggccctgccactcactggctatgtgacctggggccattcgggtcccctccctgagtctcagtggttgtctgcagaagaggatgacagcacctgcctgatgtgactatctagagagtgtaatgaggcgtgttatgggagtgtgtatgtgtgggcacacggtgtatagaatgttctgtgacatgcacatgcctggatttctcatggcttcccaggcgctctgggggcagagaacttgggggctccacgcagccctggtggggactgctggctttccagtcccagagcagagctcgtctgggtcttcacggaggtttcctgcccgctgggccatacctgccatcggattagcacggaggtggtggtgtggggcgtcacggagaggatggtgggtgcttcatcgggggctgtggagagaagcagacaggtgggttctgggggccgcagcttcaagttccccaggagcccactgagaccagattctgctaatactggactgcggggcaggtccagatcgcatcgccctccatgcctgctggcccgatttctgcagaacaaagggctggtgtaaaggggagggagggagggactgtgagctgactcagcccaaacccaagggtcccagagccccctccgctctgctcctcagagccatagaccacttctgctgctgctgagaactcctgtcccgctcactggcagcttgtgggacaggaggaatacgccacaggccaggctgggcctgggaccctgagcccttggcaaaagtgtctctggcccaaacctccctgagaccctaccccgggagctgaagggcccagtgggtcccacgcctctctcatctttggaggcccctccccccgtaagaaaatgccccatgcccaggaagcagccagtgggctgagagagagactgctggggaaggggtactgaccagcctgcagggtggtcagtgactccgactcctcgctgaactcgctgtcgccaatgtcattggtcgccttcactcggaacttgtaggacgtgaagggcttcagcctgtagggagaaatcagggccaatgagccaaggtgctccttaaaggcctcgccccatgctcccaccaaggagtctccctgatctggccctgctcgggaaagggggcagggtgccagcctactacacagaagggcacactgaggctcagaaaggagctttgctgcaaagaggacaaactgggacccggccccaggggtcccaagcacctagaccaggtcctccagaccatgccagcttggggtgcctttagccccagttgtaagccatagcatcccgagaaggaaatgtctgcagcttccccacttcgcagaaccatgcagtcacaaaagcaccaatacctccactcggaacaaactcctcccctgcccccaacaaactgccatctctttctttttttttgtttgagatggagtctttttttgttgttgttgagacagagtctcactctgttgcccaggctggagtgcagtggtgcgatcttggctcactgcaacctccgcctcccgcgttcaagcgattcttgtgcctcagcctcctgaatagctgggattacaggcatgtgctaccacacctggctaatttttgtattttagtagagacaggttttcaccatgttggccagactggtttcaaactcctgacctcaagtgatcctcccgcctcggcctcccaaagtgctgggattccgggcgtaagccaccgctcctggcctctcttttttaaatgtagtaaattagggaggagctgaggttctcaagagttaagcagtacttcatctctataagccttatttcctctgggagcaaacgtctctcttttagatttatggggggtgggagaggtggggaagaaagtattgctcaaaactcccggtcacatcaactggaatataaaaaattcaacccactcggaattaaattgaagctagaatttcggagtgacgctccactcccctattaaagctggagaggaagataccgcccggctggaagaatcactaatgaaggatgacaggcacttcactaaagggggacttctaggctccagaaatagataattaagaggcaacctaacagagttccagagggaacagagtgaggaagagcaggatagagctgatttgcgagggtgagagtggacgcgggggccgcctgggtggtgcatgtaggaggagagctgggggcaggctggaggtgttttcagaaggccccctacccagtggaggagcaccgctggtcccggcggggagaggggcagtggggatgctggcatggacccgagccttacctgtccacaatgaagctggaggcattgtggctcacggaggccgagtgcagtgcccacctgccgctgggcagctcgcgggtctggatggtgtagtagcgcacaggggagagcccgtcgctccctggctcccaggacagcagcacgctgcgtgctctcacatcctcctgctgcaccatcggcctgctggggggctgcggacggtctgggaggtggcagagggggaggagcaggtgagtgggccaggccatggtggagggggctggactttctcgagggaggaaaggaggtgatctgggctcaggcctggcatccccttcccatcccaattccatgcacgcaggatccttgcaggttctcacacctgggtacagccagcacccctctcctggttagaggcccaccctcaggctcctagagccccagggcctgggaacttacagctcctcagggcagccctaagcaaggattgacggtgaggagtgacaaacacccacccagctcctttgctcctgcctgaaacgaggctgagccgggccctgcgctgtccctgattgagcaggatgaggttgtttccctacgagaagcgctgcttcattccaggccctagcttggcttccttctctccccagcctcgctgccccgccccttctgcagggcttctcaaacctcagcagtactggaattcagaacagatgactctgtggcgggggcatcctatgcaatgcaggatgctcagcagtgtccctggcctccacccacttgatgccagtagcactcccacactgtgacaaccaaaatgtctccagacatgtccaatgtcccctgtggccaaagaagtccccagttgagaagcactgtactaatggtttttcctgagtacattttcttcttccttccctcccttccttccctccctccttccttccttccctccctctccttccttccttccttccctccctccttccttccttccctccctctccttccttccttccttcccccctcctttccttttctttctccctctcttttctccctccttctcttccttctccctccctccctccctccctccctttttccccccttccctcccctccctttcccttccccctcccctcccctctcctcccttcccttccccttccccttcccctccttcctttttctttcgttatttaaaacacagtcagggtctgtatctgtttcccaggctggagtgcagtggcacgatcatagctcactacagcctcaaactccttgattcaagcaatccttctacctcggcctcttgaatggctgggactacagatgtacaccaccacacctggctgatattcctttcttttttttttttttttttttgagacggtcttgctctgtagcccaggctggagtgcagtggtgtgatctcagctcactgtgacctccgcctcgcaggttcaagcgattcttttgcctcagccttccaagtagctggggttactgacatgtgccaccatgcccagctaatttttgtatttttagtagggacgaggtttcaccacgttggccaggacggccttgaactcccgacctcaggtgatccacctgcctcggcctcccaaagtgctaggattacaggtgtgagccaccatgcccggcctatagctaatatttctatgttctgtagagatggtgtctcactatgtggcccaggttgagagtagtttctaatatatccctatcaggccagtcggggtcccaggcttgcttttggggagtccaagatcaggcaaggtgccagctcagggcagcagtgcagtggcagccggggctccaggctgcagccctgatcctgcgcccatctgtgttgacaaggccagggctgtgagtggggaggggagagggaagatggtcactaaccctcccttaattaattaattaatttagacagagtcttgttctgtcacccaggctggagtgcagtggtgcgatcttggctcactgcaacctccgtcccccaggttcaagtgattctcgtgtctcagcttcctgagtagctgggattacaggtgtgtgccaccacgctggctaatttttgtatttttagtagagacggggtttcaccatgttggctaggctggtctcaaactcctgacctcaagtgatccacccgccttggcctcccaaagtgctgggattacaggcgtgagccactaagcctggccacaaactttccctttagaagaccagaccagagtagggtccttgggtgtgaacttgcggctcatctctgggagtctattagaccccttgctgactttgacttcagagattggagcccaccttccattctcatccagggcactgcagctcataccagccatccactaggaacagctcagagcactggctggccccccctcagctgcccccaagccttccctggcccccgtgggcagtcacctctcttctcggtggtcaccaccaaggcctcggcagcttctccccagcccttgcgggtctgggccgtgatgcggaacaggtagacagactctggcttgaggcccgtggctgtgtactgccgggcgctgggtgccagcacctccacagtggcggtgttggccgtggtggtgttgagccggtgtgtgatctggtaagctgtgggaaggaagcacatggctattatggcaagcaaggcaagccgctcctagggccccgggaagggttgttccgtccaaagccacagctgtgtctgtacatggccaccttgccgtggtccctttggctgtggtctgtctgcctgaggtctctgggtcactctccagtcttcagctgccacctggggagggtggactgtgggtggcatggagaggcactctatgcacagtgtctgtgacccccgtaacagccccaagtgaagaaactgaggcccggagaggccagaccacctgctggtaagtgacagagctggaatcccagcccaggtctttctgggctaatgcacttgtccttcctgcccccactctgtcttggggatgtggcattgctctagggcaggtggtgcgtgaggtcaggactgagaaccctgggacaggtacaggtagtccaagcccccattttaaaggtgagggcactgaggccgcagaggggagtagacttgctcaagttcacgcagctgccgaccggaaccctgggtgtgtgtattgggggaactctaaatgtgagatgaagcttcccatctgtagcctccctcctgtgcgccttgagactcttttccagctgtgctgagcctgccagcgtgccctcacttggccatgctaaggaacagcgtccgaggtttaccagatggccggcaggctgggggcctggggacatttggggacgcaaagccaacccatgactcttaagggacttcaactctgatcttgccctccggaagataatcttacacactggaatttctagcaggaggactaacacccagatcccattctagaggggatgtggaggctccctggacctactctccctcaagctggtaacgaagtggcctcctttgcagctcatgcctcttccttcttcctgcagccggggcacgggaagggcaaaggcttaccaagaatgatgccattgggggcggcagggggctgccagatcagccgcacagacgtggtccgcacctctgggaacaggatgcccatgggtggtcctgggactggagggggcaaaggagaggaggccgacccatgaggctgccgctcagctggggatgagcccagctcgggcagagcagcctggcagggtggagggggaaggggccgcccagctcagtgaatttctgtggagtactgccctgtgcctgacactgtgttaggagccaggggcaagaacgtggaaccaagggggctttctgccctcaaaataggcatcatttggcagcgacctgaggctccagcttcctctgctcattgtctgtatacacgccccagaaccgggctgccctcagagctgggcgcgtgggccctggatggatgcgtcagtgcttcagaaggtcctgttctgacttccttccacccatggggtgaagtggccgtggggtaatgggaaatgcccacccccagcctgcaccactcctctctctctctagaccttgctctggaatcctgggaccccggaattccctgcccagagaggcctaagcacgcttccagaggctgcatgggcctcgtccccacatccaccctcctgagggtaggctatgcacccctggctccagggaaggccaagcggtagctattttgcaggtgtggagatgaagattgaatggagtgggtcaaaggacagggtgaggagagaatggggcagggggtgggggagggtagctggggaggggcactcttctgtgttgccgcactgcagaacagaataagatgtctgagatttccaaactttttttttttttttaataccgagtctcgctctgttgcccaggctggagtgcagtggcgtaatctcagctcactgcaagctccgcctcccgggttcaagcgattctcctgcctcagcctcccagtagctgagactacaggcgtgtgccaccacacccggctaatttttatatttttggtagagacagggttttaccatgttggccaggctggtcttgaactcctgacctcaagtggtctgcctgccttggctgcctaaagtgctaggattacaggcgtgagccaccacgcccagcctgagatttctaaacttgaacctggccttccagatcgttgtaagggtatatctgtcaaggcaggaggatagaacatatttaacggttcattagcttgatgaataatgttagcatatgcaaacatatggtatttgggcttccttctgcactctggtccggttcctgcaaatgtctgtggtgggcagtaggtgggggcgtgtgcggggagataggagggggcaagggatgcattggtgagcttctgatggggagttttgctacagggatgaatgcctgcagcccactggtgacattcttttgcaaacaggaccaggaggttcgtgcgtccaggaaaaatactttcacagacctttactcaaagtgaacctgctccagttgaaaaataaagtaaaactggccgggtgcagtggctcacatctgtaattgcagcatgttgggaggctgaggtgggtggattgcctgaggtcaggagttcgagaccagcctggccaacatggtgaaaccccagctctactaaaaatacaacaatcagctgggtgtggtggccagcgcctgtaatcccagctgctcaggaggctgaggcaagagaatggtttgaacctgggaggcggaggttgtagtgggccaagatcgcaccactgcactccagcctgggtgacagagtgatactctatcaaaaaaaaaaaaaaaaaaaaaagaaaagtaaattaaaacgggtgcaagtccctattctgtatgcttgttttgcagagagaccaagagactgaatcagacgtcaaactgcctccgcattgtcctcagggatacacaggctgtaattagcatcccctgcagtggggctggtagctctgggtgacccatccctaccggaggcatctgaggccatggctccctgtggggcagagcctgaccccagaagggcaaggccagatgggcaggaggaagggcggctcctcccagccttccccaagcttgctgggatacggactcaccatcatccagcgtccgctccaggatgggagggtggctggggctgccgtccccgatgcgtgtgaaggccagcacctggacttcatagagcacgtatttgcccaagccggtgagctgggcactgcgagacgagttgccttccaccagccagaatcggggctgggtgtccgagtccttctccttatacatcacctgtcagggcccagcacagggtgagggcctcaggcctgcatctcacccatctacacttttcccgagtctcatccccaggatgagcagctgtgtgtcacacatctcccaacttccagaccagggctggaccatgtggctaggcacagctttaaaaggaattctaaaagataatgaaaagcaaaactgggtccaacagagctgagtgaggctgggggcatccagcgtggcctcccgggagagatggagcagccctaggccctgggtcctttctgggtgcctcctcacccacaagggatgactcatggttgccatggtgaccattggctaggacgccaggcagatcccctgtatccactctaggaggcagagacctagagggtgataaggacaaggccccttggatggagaggctggaggggccagtgtagggaccccacctcctgggatcccgggactcaccttatagcccagcacgagcccgttgcgatcagcctcggggacctcgctccagcgcaccagcatgctgctggaggtggtggccagtgcagacacattggtggggccggaagagggaactgtgggggaaagggagtggagagaaggcactcaggacccaacgttgactgtgcaagggaagtggaccaggacagggggccgagggaggggccagctcgatgttgcctctctatggaagaaacgtggcacacatggtccccaaactgcaaacaatcccactaagatggcctttggttttggaatgctgcagatgccgtttccggtttcagatgagcctcctcacaggattctctgctcaggttaggattagatgagcttgcatttcctgctagcacagcagagagggctggcagagggaccagggtggcccaggagagctgtctgtcatttaaagggtgccaggaaaaagccacagagcagtgaaccatgtgtggatggatgagagttgcctgaatgctgggctcacattctgtgggtcacccctgggcaggcccccaggagcttccggtagtgattctggaatgtcctgagagctaaccctttcctcgacccctccactgtggtctttcaggcaccactgggtttcagggttaaagctgagggcaggagagtgggcagtatgaatggtggagcctacccagctgtcctccagaggcagggatacccccgccccccttgggaatatgggaatagcaggcacagttgcagagaagtggcaggtgctgggagaggcggcaacatcattgtgacattgagcataagcagaggaaatgagctcaggctgtttttgaacaacaccttcagcctggcacgcgcttggatgaccctgagggcatagagaccaaggaggggacaggcagcagggtggctgggtgtgaggggttggtacctgactcccgggtcctgcccaccaccgtctggctccagggcccgctcccgatggcgttgaaggcctggacctggacgcggtactctgtccactcctccaggtcctcgatggtgtagtcccgctccacacggtcctgcaccacgtggctcagcgtcttgccatgcccgtctgaccggctgtacttgatcttatagcccacggactcagggttcccattgtattccatctccgggagaggctgcagcggggcaggggtggcaaagctgctatgagccaggccccccactgtgcagggaggaactgccctgctaccctctcctccagggcgccttcagggctatccatcccactgtcacccggtcagtgtccacatgaggctctctcacccgagtgtggcttaggttgtgtgactgtgtttctgatgggctcttatcttcctgcagggaggacagagaagcagcatcctttctttattgtgtatgtgacaaatctattaccctgccaagggagtcaggagccacaaaggctgtgtgtctgacacaccgatagcaccgccacctttggctctgctgtctctgctgcttacctctgtcactcaggctgccagcacacacttaattgcctaccgcacctggtctcagctcatgcctgcctttgagtgagcatgggcagagagcaggatgagtggggcacctgccagtcaggaagtccttctgtccagcaaacctcagcctctcctgctgcattttcagcctcctttttcttttcttttttttttttaagacagggtctggctctgtctctcaggctgcagtgccatggtgctgtctcagctcactgcaacctctacctcctgggctcaagcaatctcttgctgggactataggcgtgtgccactatgcctgctaagttttgtagagacgaggtttcgccatgttgatctcaaactcctcagctcaagtcatctgctcgcctcggcctcccaaagtgctgggattacaagccaccacgcccaaccagcctcctccttcttgtttgagtctcacagaaaagaaaagtcagatttctttggggccttaggactaggctgatggggctgtggtcaccagcttaaggttgtgtggatgaccatgggcagtgctggtgagagtggaggtgtgcacacagggaggggagcccagggcctggcctccactactctgaagggcacagagctggggtgggggcatctccagccctcacctcccccagttctgcttccccaggggctctggagggcccttggtccacaggctcaccctaggctgacccactttaccccactcctcaccttcggccccaacctcccctgctcactacacgcttcctccctcctgcagacacttagtgaagccgaccaaagaccattaagatagcaatcgatggtcctgagagccggagatggggcttaagtgcaagttcctttacctgctgaggaaaggtaatggaccacgcaccattaagcgtgggcctgagaagtgtctagggccctgtgccacatggcagctgcctttctattcccccatgcagtccctgccctccgcatcaggctctaaccttttagtagctgcaaaccttaaagtgagattcaggaaggaagcagggagccagcctggggtggggatgcctgggagcaaagaggcaggaggtgggtatagtcacactgtgcacggggcactgaggtgggccgagacagctctgcagctctgctcaggcaccagccactctgggaagggaactgcaatcaataactcatatttatcgaggactgacggcgccaagcgctttcatggccgctagcatcaagctgtccgcgcacaggaacggcaataatgacttcacagtgtggtgtgtttgcaagttgtgttttgcacaatgagtgagatcttacgtggaaacaaagggtttgtgtggtcagatgggcctggggaagcagggtcaagagggctcctgctatgctagtgttcctggattctctatggagctgtggtatgtggtgctgttcccacatttatttgtctaagaattcttgtttgctccacacgcctcctgggattgctgctctgtgggacacgtgctgggaaacgatgttccagagggcctggtggggagaagtggcctgttctccagaggatgagacggcagtgtgcccgatggttagggctgtggacttgcgggtaaagattccccgggttgggacctcagccctgctgttcatgaaagcacgtgggaggatacgggagaacttgggcgagtgatctgacctctcttctgccccggtttcctcatctgcaaaagggggaccaggatcactctgctgtcacaggcttgttgtcagaacagcgcctggtaggagaggaagcctcggtgtgttactgtcactacctcgtgcaggatggcccacggtcaggaccctcaacacacagcccggatctggggacactctctgaatgccacagtggcacttgaaccccagacccgccgcttgggagctgtgtggctgtgggcaagttcttaacctctctgagcctcagttttcttagctgtaaattgggatgatcatgtatcctttgtaagattattgggagaatcaaatgggatgaaaatttaaaatgcttgccacttggcgatgctcagtaaacagtatttttgagctccttcctctcatcggcgggcgggggggcatttgttcgttgggctaagatgttgattatcaggcatctcatcagaaaacagaaagagaggagaaaggagctgtaggaattctgatgtgcaccttctaggaggcaatgaccagaagctcatggagaggtcccacccctgccctcgagggagccttaccatccagcgcagccacaggctggtctcactggctgtgcgcagagacacattggctggggccatgtcagggggtgcctgcagggtctggatctttctagaaggctgactgggggggctggtgcccacgatgttcacctggcgcatgcggaagctggggttggggagagatgagcaagatggtaagggcagctcacccaactctcaaccctgtcctggtctgggccatagcccccacccacccccagccctgaggctgctgccttctccccgggccagtctcattacctgtagcaggtgaaggggttgaggtcgggcacctccatggagcgggcatcgggctcattggagagctggtggatcagcaaccactcctctccctccccaaccacgcctacctggaaaagggcaggatcttaggcctgtccagcctacagggcccacacggggtgctccgagccccagtacaagccctgccagggaagaagttggttcagaacccagggctcatctggagggcaccatatggggctaccatctttccaggcccctaaacatgactgcaagtgtgactcaaccctcctgccttagaatctctcaggatgcttgtgatcaatatattcctggattctggagtcagaatgagtttaaatctaactccactacttacagaatccctcgagtgctgcccaggaatctgtgcttttaacaagcagcccaggtgattctcttgaacaccccgggtacttccagagacccaggctgcccctcaaatcagctaaatcagaatcagagtttctggggtaggggcacaggtgttggcgcttctgaacgctcccctgatgattccagggtacagccaaggcggatatttttatattccagcaactgggtatttttctaggcaccccccgacccaggaggggactgtagtgtgtgtgtgtttttccatgtacacaggtgaggggcagggggagttggagacaacattggcaagtgtgagcatttggagtataatgggccattgagagctgcacatgaaaattcacacaggccgaaatacacataagattttgcactcaagggcacggggtgccctggcgggggctgctggtcaggccccaggcctgccctacctgggcttccaccagccagcgggagatggaggttttcccatcgtagcctggcctgaactgcaaggtcacagagcgggggccgatgttggaaatgcccaggttggtggggggccctgggagttctggaaaaggagaacagggtggggaaggagatccggtgagaatggccccccatgttgaacgggactgttgggcatggagggggctgtgtgtcacgcttttcctggaaatgtctgaggagaagcacagccacggccccactccacccacagtctttgttcctgtgtcttacggagaaccatgttcatgccaggaggctgagacagagttgggggtcaaaggggatctcctagggctgagaggaggctctcagggccaggaaacaggggccgggatgccgccttcttcctggcagttctggatgtgagtgaggtaatcataaggcagctaaaagctgcattaaaaccaagctgtgctgagaaagaaaccaaacgggaccgatcctcccttccatccgcccagacccctgcacacctcctacgcctaattacagctcaggaaggtgagaggatgggtggggacagggggaagcttattttctggccaggaatcctggggctcttggagctcaggaacaacagaaagaacacagattctggagtcagaatgagtttaaatctaactccactacttacaggctgtgtgtctttgcacaagttatccaactctctgtgcctccatgtcctccttggtaatgaagaggataatagcaacacctccctcagggttgttgtgaggattaaatgagtcaacgtgagcaaagctcccagcaccatgccccgtgaacactacatacctatttgccagcatggctgtaattatcactgggctttggctgagactcaggcagcccagccatctacgcagcaggtggagggatgctggcaggtcaaacaagcactgcctgactgatctggatgggaccacatggttatctggtccaacttcccatatatacagatggggaaactgaggcacagaggggacacagaacttgctcaaggttgtagggcttggcagaagcagagctgagagtggacctcggcttgctctctgtgccaggcctaggagtagccccaccgtgctctgccacctcccaaccaacccttccacacgctggaatccaaggtggaccctctgggcgacagtgggaaattttcccctgaatcacagataccattgcctggtgtggaatctggtgagaaatgggtgaagggagggactggtggggaaatgagacaaggcagggggcctctgcttttctgagagctgtgggaggatgcagcagggagccaggggagcccctgtccagagacctgggatcccagggattccgcctgctctgaggggacccagacccacacagcacaagggaaggggagagcctgtgggaagaacgctggtattcctgaaagacaaggggcctctttttatttttttttttgagacgcgatgtggccctgtcacccagactggagtgcagtggtgtgatctcggctcgctgcaacctctacctcctgggttcaagcgatcttccatcctcagcctcccaactaactgggatcacaagcatgcaccaccacagctggctaatttttgtatttttagtagggttttaccacgttggccaggctggtctcgaactcctgacctcaagtgatacgcctgcctcagcctcccaaggtgctgggactacaggcatgagccaccacgcccagccgacaaggggcctcttgaatgggacgctgctcaggagaactcaaagagtcctgccttgagagtgggcacttacctgggggcaccccagaggagatggtggaggcggacacttggccctggccctttgaggtcatggcggccacctcgatggtgtaggtggtgagcgcggtgaggcccgtgacacggtactccagggtcacgttgggcaggtagtgggtcacacgggtgttggttcgattgtactcctcccaggagatccggtaccctggggagagccgccgtgttggcatgagcttggctgtgatcacaagttggcctgacccactactccacttctcacttctccactaggctggcaattagatccacgctgggagcaatggggccaagggaggtgggagctgttggcatcatgccctgggtctcaggtgtcgcctcagtgggatgccagcactttagggaattgcaggggacatagtgagtcatcatggcagccactgagatctgtggcagaaggtgtggggctgcagactctgggatgtgttatgaagtggaggtgccaagagcctcctgtgagtggtttctaagaaagcatgggttggcttcaagagtttgggtgaaaagtagctcaaaggcaggggatggaccagctctgacctttcccagccctgtcctgccctctggttcagaaacactgcagtgcctacctgtgaggatgccatttttctctcccggctcttgccagctgaccttcagcgatgtgtccaggatctcactgaagctcaggtgtcccacgggcccaggcactgcaccccaaaaggaacccccaccccccaaggccagttagagccagagagagaccaccatctgtgagatagcctgtggtaatctgggggtatctcagcctgggagacaagcctgggccacccttctgcctggggcgcccagcctggccttgggcgggggggggcagaaagagcagggctggggggtgcctaccatcctcatgggtgcgcaccagctgcggggtgctgcgtggcccgtccccgggggtggtgaaacacagcactgaggtgaagtactcggtgaacttcttcaggccagacacgaagcccacgtggatgctgtcttgaaagttaggccgggcggtcaccatggtaacctcctcttcctgttccggctcccaggcgatcagctgcggagaggcgagcaagtcacacagggcagcaggaaggttccagaggaggccaagccctctcccacaggctgggccaatcaacagatggtgtccggggaccggagtccctgtggtgcctcctccgagggaagggacaggcagtgcagggaacctgcggggtactggggttcactttggggcgcttctccacttcttgagccactgactttatgcaaagcaccgtgctgggtgcttcccaggaatcgcctcgtactcaattctcacagagacccaggagggaggcatttcaccaggaacagctgcataatttgcaggctcagtgcaaaatgaaaaatttagcccttgttcaaaaacgactaagaattttaagatgatagcatcagagcatttaactaagtgtggggtccttccaaacgtggggccctggacgactgcacaggtggcacacccatgaagccggccctgtattccttttttgagatggggtctcactatgctgtccaggctggagtacagcggcatgatcacagctcactgcagcctcaacctcctgggctaaagcagtcctcccacctcagcctcccaaagtgctgggattataggtgtaagccactatgctcggcccagccctgtattttattttattatttatttatttatttttattttttgagacagagtcttactttgtcgcccaggctgcagtacagtggcaagatctaggctcactgcaacctctgcctcccgggttcaagtgattctcctgtctcagcctccagagtagatgggattacagacatgcaccaccatgcccggctaatttttgtatttttagtagagatgggggtttcaccatgttggccaggctggtctcgaactcctgatctcaagtgatccgcccgcctcggcctcccaaagtgctgggattacaggcatgagccgctgtgcccagcccaaccctgtattttacagatgaggaaactgaggctcaaagaggctcacacaggtagggggaagctggttctgggattccaagccctgagctcctacatcttgccccatgtgagctggggcagcttcgtctttggagctctccaagggttacttcctacagagctgggaacttcagtttgtgggtaactattatcctcttacactccttctaagttgggatttccatcttaaatatcaagtagaggcggggcatcggcaagaaagtcccatctggaaatccctcaagttcttgctcatctcccctctgcagatcacacctggcccccgccccctcccgcctgtctcgcctcctgctctcacctcacgctcctgtttctaggcccttcatctgtctccaataatgacagctggtttcagagatttcctcatttatttgaagttgattaaatagcaattaatggtgaaaagcaacacttgatgagttttaataagcacgggtatttatagatataaaacaataccacgccaatgtctcccggttaactcatgcctataacaatgcttaatcttctccttttcatggctgtgtatttataaaggatgttttgaaatttaattggtattgtgaaaagatagcctatagcaagttaattagacactaattagaccctcaaaatactaaacagaaatactaagtggcatttaataagtgtgttaaatatcctccgtatttcgattatcttgtttcatagcaattatgttgccgaacttctttggagtagattaagaaacaagtttaatgttttaatttaatttaattaatgtacattcaaattaattatgctgttagaattaattgtgtggtgtgttccccagcaagtataaaatctgggtaaatattatcttcctgggcttaggccaattataagctctaccattttttttaaataaaggaaaaagggtgtctttacatgtgccttaaaacaatatcactgggccttacccacaaaaatgacccagaggaagtgcacagggtaatggcagtgtggtttgtggagtcacgctcttgacttcattatcctacagcttgacgcctggatccaagatggcagcagggtcatgggttcctgtggctgtttcaaaatatttactctgggatgtgagccacttgtccttctccagttgcacgtggagaggaggaggcttggggataggaggcctccctgcctcaggtccagggagagagacagtaaaattgccttttgtgtccttcattgccctaaagggattgggctctgggcagccgtgggatggaacttcagtgctcagctcaacacacaacagggcttccacctgttgaactcttaccgtgtgcctggccttatttaatcatcacgatgaggagcagatggaaatcattgtcctatgctattacagaaaaggaaactgaggttcaggaaggttaaggagcttgcacatggacctactaagagctggctcagtttgtggaccctgagacctttcatgatgacctctgtctctcaaaggtacacagagctgctgagatgagtgttctttaggacatctctgtgccttctccttgttagtcagtttcagtgttgatttaccatactaggtccttagtctcaggttctaagtagacggggctcccctgagaaggctcgggtgtgttctggggaacgagcattagacctgagttcctgggatatgaaattcccccttagagagcagaggcccagggaggcaagccttgtaactgagcagcagtgctgctgatggagggtgttgggggagggcagccttgcagctggcacacttgaacctgaacccagctctgtcacttactgtgggactcacggaaagtcacttgaccactctgagcctcaggctattctaggggatagaaacagctgccttgctgggtttcagggaggagcaggtgaaatgtctcctgtccctggtggaggcagtactctacagggttgaaggtgtaggatgatgtatatggcatctagctactaaagttagaaaataaaagttaggctgggcatggtggcttacgcctgtaatcccagcaattggggaggccaatgtgggtgaatcacgaggtcaggagttcgagaccagcttggctaacatgtgaaaccccgtctctactaaaaatacaaaaattagccgcacatggtggctggcgcctgtaatcccagctactctggaggccgaggcaggagaattgcttgaaactggaaggcagaggttgcagcgagccaagattgcgacactgcactccagcctgggcaaaagaacaaaactccttctcaaaaaaaaaaaaaaacaaacaaaaaaccatatatatatatatatatatatatatatatatatatatatatatatatataaagatcgagaatgtggaaagtacattgtcacttatctgagaaggagagcatacacatttatgtatgcatgtacagcaaatcattggtattcatgtgggattggttccaggaccgcccgcagataccaaaagccacagctgctcaagtacctgatataaaaaggtgtagtatttgcatgtaacctacacacctcctcttatatatcttttttttttttttgagacagagtctcgctctgtcgcccaggctggagtgcagtggcgcgatctccgctcactgcaagctccgcctctcgggttcacgccattctcctgcctcagcctcccgagttgctgggactacaggcgcctgccaccacgcccggctaattttttttttgcatttttagtagaaacggggtttcactgtgttagccaggatggtctcgatttcctgacctcgtgatccgcctgccttggcctcccaaagtgctgggattacaggcatgagccaccgtgcccggcccctcctcttatatatcttaaatcacctttagattattgtaatacataacacaatataaatgctatgtaaatagttgttatactgtattgtttgggggaataatgacaaaaaactctgtgcatgtttaatatagatgcatttttgtctgaatattttcagaaccttatgagattggctgaatccacagatgtggaatccatggctaagaagggcctactacactctttttttttttttttgagatggagtctcgctctgttgcctaggctagggtgcagtggcgagatctccgctcactgcaatctctgcctccccagttcaaacgattctcttgcctcagcctcctgaatagctgggattataggcacctgccatcacgcccagctaatttttttttttgtatttttaatggagatgggatttcactatgttggccatggtggtcttgaactcctgatctcaaatgatctgcccgcctcggccttccaaagtgttggaattacaggcgtgagccaccgcgcctggcctgtacttgtttatattaaaaaaatggaagaaaaaaccaaaccaagaaaacagaaagcaatcagacctataggggagtgagaggacaaggattgaagctgattttctctgaatttgctttgtggatttgactttattatgtaaatattcaacgtaattatagaataaaattaaattaaaaaatcaatccctaaaaatcaaaaccacaatgaagcaaatgaactaatagagtattgagctgtggtaaaattacagagagaaatgacttcaaaagacttagcaatgcagtgcgaagtccatccctagagggatatacctcaggaacaagaagaatggcaataattggaaactacgttcagtaatcatagtgtggatatgactattctgaaactgttgtgtgtgtttgtgggaataacgtaggtgggtaaaatgctggtattgtaggaactggattttcagtatggacaaaagaccaatgagattattaaagagtctgtcatcatgaaatggaattgaaagtgtgagtatctatagtatcttaaaaaatattgtttagctagccattaacagggcctagaaacaacaaccatttctggaataaatgcaatgcaagtgctaaaactgtggtatctaactatcatttctcactgaaagcaacaagagccccttaaagaaatggccgatgcctggcacagtgaggggaatgtatatataatagtctggaacatcttgtcataccaaattgcaaggaagctatcagagactactggggccacgtcaagagggctcaccatcaagtcgaagaggccaatgatgggtccatttgtaccactgaactggcagcacccagtaccatttaagaagcataataatggtaatggattgaaacatgtcagatttgtaaaacaaaaaacaaaacaaaaaaaatccttggttatctaataatactaccaaacccaaaacaaaacagaaagacgtccccctccaacccaagctcatctgttacctgataagacaataaggaatcaatttagtctttattttttctgttttttagaaatagagatagcgggggcgggggagtctcactatattgcctaggctggtcttgaactcctggcctcaagcaagcctctgcctcatcctcccaaagtgttgggattacaggtgtgatacaccatgcccggccagaaccaattcattatacgaaaaatttggtaagtaaggaaaaataattaaatgcttaccctgcttttcctagataaactgaaacttcaggtaaccaaaaagttgataaagggaaaattcttgtttttgaaagcatttcagctactaagtcaagaagaaatgataatatttgcctatccccatattataacccttattgaaatgatagctcatagatgactgtcagtggttgacttcacagtaagagagacagccggactttgtgctttctgatcaaaatacataacaccatctaggaagtaaaatatttcctttttttttttttttttcttttgagacagagtctggctctgtcgcctagactggagtacaatggtgtgatctctgctcactgcaacccctgcctcaagaattcaagcaattcttctgcctcagcctcccgagtagctgagattagaggcatgtaccactacacctggctaatttttttttttttttttgagatggagtctcgctctgtcacccaggctggagtgcagtggtgcgatctcagctcacggcaacctctgcctcccgggttcacgcctttctcctgcctcagcctcccgagtagctgggactacaggtgcctgccactgcgcctggctatttttttttttttaatatttttagtagagacggggtttcaccgtgttagccaggatggtctcgatctcctgacctcgtgatccacctgccttggcctcccaaagtgttgggattacaggcgtgagccatcacaccccgaagtaaaatatttcaaataacaaaaaatcaaacctgaatcagattagcctctagctttaagttacaattcattgtaactatattgtttggaggaatgcattgaatgaccccacagggatgcaatcagcgaaatccagactgtggaaaattctgttggacaaatgactaagtttcttcccaaataaattacaagaaagagaaagggagagagaaagagagagagagaaagaatctatagatcgactgagacctaaaaaaaacccctcaactgactgcaattgtgtgaacttcatttagatcctgaagcaaataaaaccacgagtaacagattatgcggcaatcaagagaatttgaaggctgactggatatctgatgatattacagggcctgctgatatttttagctatcataatgataatgcagttactgtggttttattttaaatagagatctcatctatactgtttctttccagaaacattcatggatgaactgatacaatgcctggaatttgcttcaaaatgttccaagggaaaggcagagggttggggcagagatggaacatacctggctgggagttgggcattgttaaagctgggaatggggatacaggtgttcactgcagtctttcctctacttgggtggatgtttgaaaattttcacaattaaaagggggcagccgggtgtggtggctcacgcctataatgccagcactttgggaggccaaggtgggtggatcatttgaggtcaggagtttgaggccagcctggtcaatgtggtgaaaccccatgtctactaaaaatacaaaaatgagccgggcatggtggcatatgcctgtagttccagctactcgggaggctgaggtaggagaatcacttgagcccaggaggcggaggttgcagtgagccgagatccaacctgggtgaccgagcaagactctgtcttaaaaaaaaaaaattagctgagcatggtggcacatgcccctgtaatcccagctacttgggaggctgaggcacaagaatcgcttgaacccgggaggcagaggttgcggtgagctgagattgcgccattgcattctagcccgggcaataagagcaaaactccatctcaaaaaaaaggaagaaaaaaaaaacacaaaaggggaaaaatgctcattcttattggaggtatacaagggacaaacactgcttttttctccttgtgatatgctgaaggctaaagaagcagaggaaaaaaatctctgctgcttttattcattggtattgaaaatgttatctacaattaaaaataatacattctctctctctctctgtgtctgtctgtctgtctctgtctctctctttctttttttgacacagggtctcactctgtcactcgggctggagtgcagtgacgtgatttcagctcactgtagccttgaatcgtggtctcaaacaatcctccctgtcttagcctcctgagtagctgtgatcacaggcactcaacaccacacctgactaacttttttgtgtgtgtaaagatggagtcttgccatattgcccaggctggtctcaaactcctgggctcaagagatccccctgtcttggcctcccaaagtgttgcgattccaggcgtgagccacggtgcccagcctgacatttctttttaatgtaaggaaaagtgaaggctctggtttgaatctgagctttgcatgaccttgacactgtgtttgaccttgaacaagtaacttccctctggtgcctcagtttctttctctgtaaaatggtgtgatggtaatattcctttttgtttttgtttgtttgtttgttttgagacagagtctagctctgtctccctgactggagcgaagtggcgtgatctcagctcactgcaatgtccgcctcctgggttcaagcgattctcctgcctcggcctcctatgtctgtagctgggattagagatgtgtgtcaccacacctggctaatttttgtattttcagtagagacaaggtttcaccatattggccaggctgttttcaaactctcgacctcaagtgatctcctgcctcgacctcccaaagtgctaggattccaggcatgagccaccacccccggccgataatgctgcttcttagagtccctgtgctgcttgcatgaaagataaatgtgagcgaagcatttagtgtactgcctggcccagagaaagggccctgtaagtgtgaggtctccttactcctccaccagtttctgtgctcaaaacgtctgggcaattcactcctgctgacctttatcgagtagctactgggggctgggcactgactggacctgggaattcagtggcctctgccacctcctcttgctctgggtcaccatgggccactgccctaattgtcctggccatgggctggccttcctggccctcgggggagctgtttgccttaaaagtttgtagctcagccctcccatatgtagaataaaacttgtgcttagaattggtagcaagaagctaattgttcccagttcagctcctctgctcttcagcaatgccggcctccccttccttcctctgcctccccccagggtcccaattaggagagttttccggcagcgagtgctccaagaattcagctgctgctccctgccctgcaaagctctgctcgaccttgggttcactgccttcctgggattgagagggccaaggccggagtgaagctgggtcatttccagttctggaccatccctcctttgtttgcttgcaacactagcagaaactcctcttcattatttcatcccagtcccttcttgtccagcctcccccactttggaggaagaaccgctaaggcagcgagtcctagaattaatcttagttgtggcaagcacagtgcagaggggtgcaggaaccttcgggatgtgtcagtggtcacctcgaggtcatgcgttccctggactgaagctcagggcctgcagtgctctccgcttcacagctggcctcccctcaaatgctctgcctcccctcccacatctggagggagtggacggcatccttccgtctgccccacgttgctgggggcaggtcctacccctttaaaacatagtgtggatcccccatgctgtgctctgtctttagtcctccgtggggaggacaggcacggggcccacatggaatgacacgagagaaccgggcctgggctctgaggtctgtgttccaggatgggaggactgagaagtcctgacctttagctcagttggaaggagagcaaatgtactactactactattattactgctattttttttttttttttggtcagagtctcgctggagtgtagtggcagaatctcagctcactgcaacttccgccttccaggttcaagcaattcccctgcctcagtctcccgagtagctgggactacaggcatgcgccaccatgcccagttaatttttgtgtgtttgtgtatatatatatatacgtatatatatatctacgtatatatatacacacatatatatgtagatatacgtatatgtatatatacgtatatatatgtatatacgtatatgtatatatacgtatatatgtatatgtatatatacgtatatatgtatacgtatatatgtatacgtatatatgtgtatgtgtatatgtatatatacgtatatatgtatatacacatatatgtatatgcacatacacacatatacatatatgtatatgcatatacacatatacatatatacatatatcctggaacatatacatatacatatatatatgtgtgtgtgtgtatatatatatgtgtgtatatatatatatttttagtagagatgggatttcaccatgttggccaggctggtcttgaactcccaacctcaggtaatccacccacctcagactcccaaagtacaaggattacaggcatgagccaccatgcctggtctactgctattattactattattatctgttatgggctgagttgtgtctgcaaaatctgtatgtttaaattctaacccctagcaccccagaatgtgactgtatttggagacagaattgttaaagaggtagttaaatgaggtcattagtgtgggccctaatccaatgtgactgaggtccctataagaagaggacatttaggccaggcgcggtggctcatgccagtaatcccagcactctgggaggccgaggcagtcgaattacttgaggttgggagtctgagaccagcctggccaacatggtgaaaccccatctctattgaaaatacaaaaaaattagccagacatggtggcacatgcctacagtcccagctactcgggaggctgaggcaagagaattgcttgaacatgggaggtggaggttgcagtgagccaagatctctttggacacagacacagagtgaagacagacacctagaagtcaaggagagaggcctcagaggaaaccaaccctgcccacacagtaatcccgtacttctaatccccagaactgtgcaaaaataaatttctgttgtttaagccagggttccccaatcccccacggaccaccaggtaccagtctgtggtctgttaggaaccaggctgcacagcaggaggtgagcggcaggcaagaaagtgaagcttcatctgtacttacagctgctccccagtgctcacattaccacctaaactccacctcccatcagtggcagcattcgattctcacaggagcgtgaaccctgctgtgaactgtggatgtgagggatctaggttgcgtactccttatgagaatctaatgcctgatgatctgtcactgtctcccatcacccccagatcggaccatctagttgcaggaaaacaagctcagggctcccatggattctacattgtggtgagttgtatagttatttcattatatactacaatgtgatagtaacagaaataaagtgcacaataatgtcatgtgcttgaatcatcccgaaaccatccctcctcccaccccaatccatggaaaaattgtcttccatgaaactggtccctggtgccaaaaagtttggggactgttgctttaagcaatccagtctgtggtacttggttatagcagcccaaatgcatttctacgaccactaaaatcactttccaagtggttatcatgtgtttgtcattgtgctgaacaaattagaaatattatctcacttaatcctcacacaactccaagaagcaggtattatcatcttcatttgcaaatgagaaaactgagtttattttagttattcagcggtgcgagcagtgcatagagtagctgctcaataaatattgattgaaggacagaagctgagacatattaaagaacatgcgcaggttgccagcaagaggcaaagctgggactttaaccaccaagtctgtctgagtcctaatcctgtgccattaaccacacactacgtggagtcgagtacagcctggggatacgtttgagcatgaagcccacaagagccacggtaagaagtgaatggtggatttttctcatggggccatggctataccaggtgtttctttttcttctttttctctctctcttctttttttttttttgggacagagtttcattctgtggcccagggtgtagtgcaatggctgcaatctcggctcactgcaacctccgcctcccaggttcaagtgattctcctgcctcagcctcccgagtagctgggattacaggcgcccctgccaccaagcccagctaatttttgtatttttagtagagacggagtttcaccatgttggccaggctggtcttgaacttctgacctcaggtgagctgcccgcctcagcctcccaaattggggattacagatgtgagccactgtgcccggcccctacaccaggtgtttctgagcctgaaataacctgggttttgtgtataacccagtctcgctgggaaggaccgtagcactgagtgtcagtcagggcagtgtctgcacttcctgtggcccacatgtagccttggggaaggcctggaactcttttcctctaatgtgtgtccctagcttgactcgagccaatgacttcagaaacagaggggggatttcctcctgcccactctgtcccctctccccaccccctccagaagatcttagggcctcctcttgggtgaggagatgcctcatgtaccttgtagccctggttgatgccgttgatgaactgggggctgggggcgttccaggtgaagcggatggtcgtggaattggtggcttccgcgtgcacattgcccggagggaccgtgggaactagaggagatgagagaacggggtggggtggagggggcccagtcagtctctcttgcccagttcagtagagaaaacgcaggggtgggggctatagcctctgccttgcacccccctaccccaccccaactcctccctcgctgtgtagacttaagaggccttcatattctctctggattagtttgcgtttaataaaacttgcctgacccacctcacagggtactggtaaataagaggggtgcggatgaaaaatgctctggcatggttttcaggtggaatgctaaaagtaagctgtttcatgatctacttaacatgaaattcacagaaggtccccatatgcctggagcctctgcccttcaccatgtccaagccagcctcctcttcctcttcccctcagtcctcccaccctgtggggtagattggcctggggtggtgattccagccccagggtgcaatagtaggggcctggtgagaacaggccacacagccaaggctctcgggcctggacaggcacagaacccaacaggcatgggactgggagaaggggaagcacctgctcctctgaggccatagtctcttttcatttcatttcacttttttttttttttttttttgagacagagtctcactttgtcacctaggctgaagtgcagtggcacgatctcagctcattgcagccttaacttccccaggctccagccttggggacctcccgagtagctgggaccacaggcatgtaccaccacaccaagctagttctgttcattttttgtagagacagggtctcactatgttgcctaggttagcctcaaactcctgggcccaagcgatccacctgccatagcctcctgagtagctgtgccactgtagcatgtagcatgccaccacacccagataatttttttcactttttgtagagatggagtctccctatgttgcccaggctggcttaaaactcctgggcttgagcaatcctcccgtcttggcgtcccaaagtgctaggattacacgcatgagccaccgcgcctggtctgagaccacagtctctacctacctccctgcagcgtccactcggtgactttactgctgtagacccccagcccagcgctgttgtaagcagccacctcgatctcgtagttggtccaaatgatgagatcctccagcagcaggttgttcacatcagcatccgtgatgttcttaaactggtaccccacgggcagcccggccaggcagtacctgaggggaagaggcgaggcacagtggagtcagagtcagcttccttggcctcgtacccaggaaattgtccagagcagcgctgtccaataggacttccggtggtggcggaagtgctctgcacctgtgctgtccgacagggtgcccgccagcacatgcagctgctgagcacttgaaatgtggttagtgcaaccgaagaaatgaattcaatttttttttttttttgagacggagtcttgttctgtcacccaggctggagcgcagtggcgcaatctcggctcactgcaacctctgcctcccagattcaagtgattctcctgcctcagcctccctgagtagctgggattacaggcatgtgccaccacactggctaatttttgtatttttagtagagacagggtttcaccatgttggccaggatggtctcgaactcctgacctcaggtgatctgcctacctcacttcagcctcccaaagtgctgggattatagcatgagccactatacctggcctgaattagaatttgttttagttttgcttatagttgacccttgaacaacacaggttggaactgtacaggttggcgtacacacagaactattattttattttatttttttagatggagtctcgctctttcacccaggctggagtgctatggcatgatcttggctcactgcaacctccacctgccaggttcaagcaattctcctgcctcagcctcccaagtagctgggactacaggcatgcgctcccatgcctggcttattttttgtatttttagtagagatggggtttcactatgctggccaggctggtctcgaactcctgacctcgtgatccacctgcctcagcctcccaaagtgctgggattataggcgtgagccaccatgcccagctacacagagttttaaaaataaacatatcagaaaaagttttagagatttgtgacaatttgaaaaaactcgcagatgaatcacatggcctagaaacattgaaaaaattaagaaaaagttatatcataaatgcataaaaatatacgtgttaatcgactggttataggtgtggcttctggctagcagtaggctattagtatttaagtttttggggagtcaaaaattatatgtggattgggccgggcatggtggctcgtacctataatcccagtgctttgggaggcccaggcaggtggatcacttgaggtcaggagttcgagaccagcctggccaaaaagatgaaatcttgtctctactaaaaaaaaaaaaaaattagccggatgtggtggcacatgcctgtagtcccagctactcgggagtctgaggcaggaggatcacttgagcccaggaggtggaggttgcagtgagctgagagtacgccactgcactccagcctgggcaatggagtgagaccctgtctcaaaaaaaaaaaaaagaaaataaattatacatggattatcaaccgtgagggggtgagcacccctagcccccacactgttcaagggtcaactgtaatttaagtaaccagagctagctaatggttaccttactgggtagcagaggtctaggggatgtgtctggactattctatttgatgggggaggattgctaaccaggggcactgagaggtcccagggcagaacttgcaggtctcagccttggaggggtcatggactggagagctgtccctgaagcctgggctcattttctttcctcctctaggatacaaggctccctcttctgaaagttactcgcccaggtggaatgaaacacctgggctacctactcgacccatttctacctccactggcaaaaagaactcacagcactaaagaagtaaatgtgtacaagcaaattttgggggtcagacacaaaggatgggtcattcatttgagaaacacgatgcatatataattcagcatctaattattggaaaattaaggacctcaaagtattctgatgcattacaatgccctaaaacactgcttctctaaacctgaagatgcatcaaagtctcctagatgagttttttttttttttttttgtttttagatggagtctcgcccaggctggagtgcagtggtgcgatcttggctcactgcaacctctgcctcctgggttcaagtgattctcctgcctcagcctcctgagtagctgggactacgggtgtgtgccaccatgcccaggtaatttttgtatttttagtgaagatggggtttcaccatattggccaggattgtctcaatctcctgaccccgtgatccacccgccttggcctcccaaattgctgggattacaggcgtgaaacaccacgcccggcctgaaagatttttttaaaagcaaaggtttctaagcctatccttaaagtttctggtttggtaggtcttggagagacttgataatttgcatttctgaccagttctcaggttaggctgatgccatgggtgctgggaccacactttgagaaccaccgcccttcaggattagtgaaaaacccacaacaaaattaaccaatagtggagcagttaaacccctgtgagggtgtgtacatgcaggaatgagacacacgaagttgcatagcattttgtagccagaatctagaatatcaatgagagttctcagtaacctcagataacttatgaatttgaacttatgaataccacattttagtgacccttaatgactcccatttaggttactagaagagtagtccctcagtcaaatgcaaagataagggtctgtataactgggcttcatttccagtaataaccaaagaaagaactttcacttttccatcaattcttcggccagctggtttctccactcacgggtcaagagaattctggcctgtgatggaatattcgcggcttcccagagcgttgccccttggaaagttacttatttcttctcctgtctccttgtaggcctgttcctatgtcagcccatatagcctcccctctcacgcattcctcgctggtgtccaggggtcttgccactggaagttctactaggtgtccaacctaaatccttcctaccactgagtaggcatttcttgttacctagtccttcctagatggcgaagggcctgccatgaatttgcactgttttccagtccactcccgatcttcccccatgcctttccccttgggactgggctcctgtccccagggtggacacccacctgatgatgtaacccttgagaattccattctggtggctctcaggaggcggctgccactggatcatgatggactggttggttcgaccgctggcgatgacgttctgtggaggggccgtggggggctcctcggggagggagaccctggatcacaaaacaccaatgctcttagtcttggggtcaaacacaggagttgaatgggatatgagaaggctgaaccctggcctgctctgactctggataattcggtacaactgctgtgtgcatctgggcaagttacctgacttctctgagcttgttctataaaagaattataataaagctctacttgcctgccttatgagactagttgaggctcaaatgatactacatatatagtctctgtgtatatgtggatatatgtatatgtcttttaaaaactataaggccagatgctgtggctcatgcctgtaatcccagcactttgggaggctgaggcaagaggattgcttgagggccagagttcaaaaccagcctgggcaacatggcaagaccctgtctctaccaaaaaaaacaacaaaaaaaacccaaaaaaactccctcctggtgacttgcacctgtaatcccaaatacctgggagactgaggtgggaggatggcttgagcccaggaggttgaggctgcagtgagctgtgtttgcatcacggaactacagcctgggaaacagagaccctgtctcaaaaaaaaaaaaaaaattaatgtacatgtttttggtgccgttgagggatgtaagtttcagtttcctatttgtcaaggaagctgctgttggggctgatgaggtcatgagtgtccaagtgttctataagcagaaatgttggtcacatcccactggtcagctgctggtgtaccttaactaggcctcctttgctggccagctgagccccaggcaggagcagggcgggcatggcgtgtgagggagagagccaaggacacccaccctgcctcggggagccaagcgcgacagcacgtctttctctggcattgctgggggatgctgtgttctgcctaagtgtacttttcacatcacggacacgtgtccactccaaacaaaagttaattatttttgatggatgactttccctttttgtttatgtttttgctttttgatggatagctttcctaagcatgctgctcgctcccgtgttttatttgagagagttttgctctttcgcccaggctggaatgcagtggcatgatctcacctcactgcaacctctgcctcccgggttcaagcaattctcctgcctcagcctcaagagtagcgggattatgggtgcctgccaccagggctggctaatttttatatttttagtagagacggggtttcatcatgttggccaggctggttttgaactcctgaccttaggtgatccacctgcctctgcctcccaaagtgctgggattacaggcatgagccactgcacctggcccgctcctgtgtttttgtagaggctggggtaagggtgatttggcctttttcttttttgtttttgaggaaagatttcactcttgtcccccaggctggagtgcggtggcacgatttcacctcactgcaacctccgtctcccgggttcaagcaattctcctgtctcagcctcctgaatagctgggattacaggcacgtgccgccatgcctggctaatttttgtatttttagtagagatggggtttcaccatgttggccaggctggtctcgaactcctgacctcaagtgatccgcccccctcagcctcccaaagtgctgggattacaagcgtgaggatttggcctttttcttggtgactcagggcggtttgcatgaaggtacattaggaaggtgagtcagtgtgatgcggtgcagccgcagggcaggagaagttgcagggtagcttcccctacactttcagcctctctgttgttgggattgtgtatctccagatgcactggggctatgtctgttcattccctgtcctccctccagtggtccaaacgtggcatggcacacggtagctgctcagtaaacagtgagtatgtaaatccccctgtaactgctctccacacgggctgccacctgccactgctccctcccgtgagattgtttgaccccagtggtgctaccttagtacaagccagagagacccaagctcattgcaactgtggcaaaaccaccatgattgatttaagccccaggcgtctttcaaagagccaagtgcaaggctttgcgcacgtgatttgtatcacggttgttctgacctctcccatgacatctttcttgctagaggtggctgcttgttctacggagctggagaggatagaattctccttctacatagatgggtatcaccgtgtgatgtttttatatgaagcatctgcagcttttattcaatttccatcttttttttttttttttttttttgagacagtcttgctctgtcatccaggctggatctcgactcactgcaacctctgcctccctgattcaagggattcttgtgcctcagcctcccgagtagctgggattacaggcgcccaccaccacacccagctaattttcatattttagtagagactgggttttgctatgttggccaggctggtttcgaactcctgacctcaggtgatccgcccgcctcagcctcctgacgtgctgggattacaggtgtgagccaccgtgcccagcaatttccatcattttataaaagctttgcgggaaccctagcagggcctggcgtcgtgcaagacatggatatggagatctgtgtagatcctgtatctctggaattttgcatccatttaacaatgacagcagcccatgcggatgtggagtggaaggaggtgagcctttttgcttgcacagctcccagtaactgggatgactacatttggttggtgctcaccgcgttccccagtgccctactcagagcaccccatttaacctttgcaacatcctggtgaggcactcatcaggattgctctccccttctacagaggcggaagcctagagggggccaggaggagctgagccagaatctgccacatcggtttcggctgcagcccctgcctgttggagtcctggcgacgcccctgtagagcgccagtgccctcacctctcggtgtctttgctgaactgtcctttccccacgtcgttgacggcacaaagacggaactggtaggagcgtgcaggaaccaggcccttgactgtcactgaggtagctttggggtccacactggccaggagtacagtccagggggcatctgcagggacagtgagtggggcagaagtgggtatcttgggtgggatgaagcatgcttcttactccccactcccagcagggtccagcttcactggggctggcaagagagagcctccccagcttggtgcaggagtggcccgccatgccatttttctaggtcccattagctcacacgaccctggggaggagacggtggagggtgccggaggaaagtaagggcttatgggaactgagatgcatttgtctcccccactaccccccacaaattgatgagctctaggcaagctgtgtttaaaatgccattcaggctgggtgtggtggctcatgtctgtaatcccagcactttgggaggctgaggcgggcagatcacctgaggtcaggggtttgagaccagcctgaccaatatggtgaaatcccatctctactaaaaatacaaaattagctgggcatggtgatgtatgcctgtaatcccaactacttcggaggctgagacaggagaatcacctgaacccgggaggcagaggttgcagtgagccgagatggcaccattgcactccagcctgggtgacaagtgtgaaactccgtctcaaaaatgaataaataaataaataataaataaataaaatgcaatgcgaattatgcctgctcatttgacttggggaatacataaataaataaataataaataaatactggccattttctttgcagcttctgctgtgccaggccctgagttaagcaccttttgtgcgtcatctctttcaactgtaacagggcctgacaggcagatgcctgtgtttccttcagagatgggaacgctgaggctgccagagggaaggatctgctcaaaggcccagaactaggaagcaggagagctgggaccccagcccagggctgactcctaagtccaagcttgggcgggaggtgttggaggtgaccacgggaagcttactgttctccgacatctccagaatgtagcggatcagggggctgttgccatcaaagggcttggtccacgtcaggttgatggctcgcctttccacggtgctgagagtggccactgggtgctcgggcgcgtggggcagttgcctggaaaagagacacgtggtcaggcatccctatgtggtctgcaggcaggtgacgggggcgctgtggacacaggttgtgtaggccttgaccttccatgataccgcatgcttagacgtaaaatgtggccttcgggccatctacctggagatttttctctctggaaccagagccctcctgctaaagccatcctcacacccccctgctcttgacggagggcctaactgagctgagagaaaggcctggaaggatgctgggggtatgtcctgagcaaagctgaacagttcaggtcacacgtggcctggggatctgaaaaaagggactcggctggctctgagcatgccagttgctattgcctggaccgcctctgccggggtctgggagggctgcccttacctgactcgcaggtgggcactgcgagagtcgttgcctcctgctgagatcacccggcaggtgtacgtgccgatgtctcccgaccacgtctgtgagatgtgcagggagccgtttctgtccaggcggatacgaggatggctctccgtgcccagggtggccccgtccttctcccagatgtacctaaaagtaagaagaacccgtaagtacagagggagaggaaggtaccttgggagtgggcctagcctgaagcttgtcccgagaaaatagctccaaagctgggcagaggacaactgcaggcaacagccaggcaggacactgggatcggggagcgggacactgttgaaggccaaacagtctggaagcccatcgttcctgcggggagggtgcaggagagtgggagagcgaacgcattcagtcattattggtcgttacaccttcagttcaggttgggtcaaagcgttgttgcttctggccagaagcgcttgcaaaacagccagtgaaaggtattcttctgaagaggctgaaagattacagctgaaaaaaggaatgcaagtttcctcatagtcacatttctgaattagttttatgaggggaatcattatatcaatgcatcagtgtgacaaattgactatagtgtccaaaaaaatccctttagcttcggtcagtcaatacaaatggggcttgagaaattacacacgcatcagtgcttgacaataaaaaatatcttctctgaatttgttcttgaggaaatagaaccattatcattgtcatcaacatacagggagtgccagccctggggggcaggatgccacacaatgaacccaggcgaggttggccttggttctcagtacaagtgtgaggaacccggtggtggctgagatgctttgcaaatagccccgttcagctggggtacagggtgggggcctgagctgctggctcccaggactatctgggtttacataatgtcagataactagggagagtgaatctgtaatatttttaacctaagtttcaaaagcagaaccaggctgggtgcatggctcacaccggtaatcccagcactttgggaggccgaggtgggtgtatcacctgaggtcaggagtttgagaccagtctggccaacatggcaaaaccctgtctctactaaaaatacagaaatttgccgggcgtggtggccagtgcctgtaatcccagctactcttgaggctgaggcaggagaatcacttgaacccgggaagtggaggttgcggggagccgagatggtgccactgcactccagcctgggcgacacagcaaaactccatctcaaaaacacacaaaaagcccccccaaaaaacagaagcagaaccaacagaaaagtaaaaagtacgggtaagaaaaataaaaaaagaaaggaaaagaaaaagaaaactcaaaagttttctgatactagggaaccacgattaacatttgaatgtgtgcatatcttccagacccttcttccccgcccggataggcagtgcactgcagcactgctgcattcaggagtcagactctcaggccaaatgctggctttgctactttccagctttgtgatcttgggtgagctaatttattaatgaatttatttattttagacagagtctggctctgtcgcccaggctggagtgccgtggtgcggtcttgactcactgcaacctccacctcccaggttcaagtgattttcgtggctcagcctcccgagttgctaggactataggcgagcaccaccacgcccgactaattttgtatttttagtagagatggggtttcaccatgttggtcaggctggtctctaactcctgacctcaagtgatccacctgcctcagcctcccaaagtgctgggattacaggtgtgagccaccacgcctggccttgggtgagtttatttaaccttgctaggcctcagttgcctcacctgtaatatgaggaaactaacaccacccacctcatagcactgctgtgaggattgtgcaagctaatataaaatagagaagtgcctgaaccacggcaagcggtcagtaacagttagcctttgttacatattttaaatgatacagtatatttacatgaatggtatacagcaatctattcagccatcctatttttatattttattttattttattttgagacagaatctcactctgttgcccaggctggagtgcagtggtgcgatcttggctcactgcaacctccgcctcccgggttcaagcaattctcctgcctcagcctccctggtagctgggattacaggcctgcaccaccatgctgggcttttttttttttttttttttttttttttctgtatttttagtagagacggggctttgccatgttggccaagctggtcttgaactcctgacctcaggtgatccgcctgcctctgccgcccaaagtgctgggattacaggcttgagccaccacgcctgaccagtcatcctgtttttaaagctgctttttgactcaataaaaatatcataaactctttttgatgtgatatttccacaccatgattttttattggatgcacatgtgtcagtacagctgttttgtaatttaaccgatcccataatgttggacatccagtttagctccttggtttctaatattatagttaaagctgtggtccttatggcaaaatgtttacaaccattccaaatcatttcctcaaggacaaattctcagcagtgaaatcgttgagttaatttttaagtcttttaatacctatttacaaatcaacaacagtaatcaccttcaattcatccctttatttagaaaggacttgccagcactcacaggatgggcagaattttacttaaaagcaaatttagttgcagagagtaattcccatgtaagaaatagcctatgggggccgggcgcggtggctcatgcctgtaatcctagcactttgggaggccgaggctggcggatcatgaggtcaggagattgagaccatcctgctaacacggtgaaaccctgtccctactaaaaatacaaaaaattagccaggcgtggtggcgggagcctgtagtcccagctactcgggaggctgaggcaggagaatggcgtgaacccgggaggcagagcttgcagtgtgccgagatggtgccactgcactccagcctgggtgacagagcgagactccatctcataaaaaaaaagaaaaaaaagaaatagcctatggcaagcagacattctttgcttcagaatgtggtgctttaggaagcagagatcactgcctgtgaagtatttgtgccaaaacaattgaacatgaatctaattagcagttactgaaattgaattataaatacagaggatagaagaacaggttaacaacactgtgagacagcagccaggccaatccagagtgttgaatattccatagcaggatcaacaaactatggcctgctgcctgtctgtgtaaataaagttttattagaacacagacatgcccatctgtttacttagtgcctgtttacatatggctgctttggcactataaacagagttgagtagtcatgacaagaccatatggctctcttaaagcctaaaatgtttactttttggtcctttacagcaaagattgctgacctctgtcttctagaacctggtttctccaacaaatcaattacaaaacaaaaacaaagataaaaataaaaaagaagtcttttcaacaaacagtgctggaaaaccttgacatccacatgcaaaaaaaaaaaaaaaaaaaatctagacacagatcttacacccttcacaaaaattaactcaaattggatcccagagctaaatgtaaaatgcaaagctataaaactcctagaagataatacaggagaacatctagatgaccttgggtttggcaatgactttttaaatacgacacccaaggcacaatccatgaaagaaagaacagataagctggatttcattaaatcaaacattgctgctctttgatagacactttcaagagaataaaaagagaagccacacactagaagaaaatatttgtaaacgatatctttgataaagcactgctatccaaaatctacaaagaactcttaaaactcagcaataagaaaacaatctgattaaaaaatagtcattgacagatgcctcaccaaagaaggtacacagaagaccaacaggcaaatgaaaagatgctgtacatcatatgtcattagggaaatgcaaattaaaacaacaacgagatatcacagcacagctattagaatggccaaaatccagctgggcacagtggctcacgcctgtaatcctagcactttgggaggctgagctaattttttttgtatttttagtagagacggggtttcaccatgttggacaggatggtctccatctcctgacttcatgatccacccgcctcggcctctcaaagtgctgggattatgggcgtgaggcacggcgcctggccagagtgtttttttctagaactattttggaggttttcatgctagaaacctgcacccgcccaggccctcacccctgcacctggctttgctctgaggacgtgtcactcaggattcagcggcaccactttagtctggtttggttgttgagatcctttctattaggttggtgcaaaagtaattgcagttttgaccattcctttcaaaggcaaaaaccgcagttacgtttgcacccacctaatagtctgcttagggaaccctgctgtgttttgcagatagaacagggttttcaatcctggtgacacattagaatcacctggggagcttcttaaaattgctgaggtctgggtctcaccccatccccaagatctacctcaagacggagggtagaagggatgtccccgtccccccagtccaaggaagacagactggggtgggagctgctggggtggccttgggcatagactttgccaattttgggggggataaagggatgattctgctccccagaatcatccctttgatgaaaagatggtcctagatggttaattccgtttaaggcgaggacctcccttcagtaacctggtacagggatttctgacctgcagttcactggaagggcctacagagtgggtctgcaggttactttgcaagagacccccgaatcccattatgcatcagtaactgtctagagaatgaatacaatgtatgtctttctcaaataagttgacactttttataagtaagtcatcttttttataaataaagtctgatttaaagtatactgaatttcagaatttccctattaatgaatgctaaaagtatagctactacacaatgaatgggcccgagatacacagcagtattctatgtgggttctctcccaggaccttttttacagttggtatgttaattttttaagaaaaatctattaaacccagaaataagcatattctggaatctcagtcaaaaatcttctaactattaatacatctatgtacatttttgcatttgtgctagcgtcatgtgatgactgccttaagtggtcaacacttcatgaggtgtttctcaaactggggccgctgatatgttctctgagaatcagtgttggccaaaagcctggagccccttgtaccaacctgggctccccggagtctcatttgggggtggctgtacagactgtcataggtccagtggccaccagatggcgccccaggacgcagctgccttcggcatgaggaggaggccatttctcccagtgcaggagcgccggccccttctagcctcggtgccagttgctttgacagtgatattgctcataaaatagagaagcaacacgcagggaatatttatttctaaggaagcagttgcatttccctcagcattctggagctcaaggaagagaaggcagggacaatctcctcctggttttagcttccaaagccttgggggtgggggtagggtttggttcaggtgcttgggaggggtcccggcttttatacctttcttggctgcttcctcccagcccttttagtggcttccacagaggcgggactgagttacctggaagccaagtcccttgccaaggtcccggcttggccatggaagatggtggggtgacctcggtttggaggctcagtttcccacatgtgcttctcttgcagggtccccccaggggtcatctcctgccccacccctatagctgatcccatatccgcctgcccagacccctctgctgcccattcagaggccagagggccaaagacttggggtgggctgggggacactagcagtggcgtccagggccagagacagcagctccttcccttccatgctcactaacccacaagcctcttcctttcccctccctcaccccctcctccattcctcttacttcatctttctgcaccccttcctcttttcctcccaccttggaaactggcttaactcaattcagggtagctcagttcccgggtgtttatttcataccccctacctctcagccctgcactcagctctggaaatgccactgcccaggagaaggcgtggctctgcagctgttacctccctaatgtggacactcgcccagctacaagctattgccagaggctccccctcccctcttgcctggagtcaacagcagagccagtacctgatggttactcgggggtcgtgggtcactccgcacaccatggaggcctgggtgcccttgatgacactctgatcctgggggggcttggtgatgcgggtccgagctgaaagatacagcggagacagcatggtgagaagaggtgtgggggctgtgtggctggactctgggtggataccatatgaaagcccccaaatggttaaaaagaacaatgagctccctggtactttaattcttggaagccacgtcatagttggggctcattaaattttgctctcacaaaccatgtatgggatggagagaccaaactctaaggacgatcaggaccatattttcagcatatcagtggtccagccagggtaaaaatagggctttctgatttccagtctagtgcttcatgcaccaggacccctgggctcagcccagacaagtggcccacaggtatgctgggtgtggatccaaagttggaagtggcttgagaagctctcttacagcaggggtcggctaactacaggctgggggccaaatccggcaggtggcctttttggctaaataaacccttactggaacatagccacgcccattggatgacataccgtctgtggctgctttctagataaaacggaagctagttgagtcgttgtgacagagaccgtctggcccacacagcttaaaatatttatgatctggccctttcttgaaaatatttgccgatttctgccctaaaatatatgaaggcagctctcctataacttcaatgttctctcaagtcggccaagcatagcatcaccggcagaatcttcctagtccctggcctctgaaccactttgtcactgtccctctgatgagaagggccctgactgggacagacactggggatggagacactggtggtatgagcctgtgccccgtagctgtcctgagtcctcagcacctacagggatgtacacacgcacacacaaatgtataaagccctgtggctctgcacactcaccccaaacgactaggtctgctgaggcctcatcgaccccccgagagttggtggccaggcaggtgtaggtccccgcatcggagatgtgtgtggggctgatgaggaggctgcccgactccaggggtgtgaagcgaggcagctgcacagagccactggccaagatgcgctcccctgagggcaaaacagggtgggggtcagcctgtagcccccaagggcacaccctgcccttccctggccgctccagggcagcatggtccccccacaggcccctggctctggaaatgctggaaggaatgaggacagatggcggtggggctggggtgggggctgagagacctggagagctttctggcttagggacggacacgagggcacagggtctcagagcgggcagcctagagcccaggtcccctgatgctcctgtgcccgccacaccacgtgcccttcaacagagaagggggcgcagtttcctgatgacggtgagcagtagcccggcacagccctcagaggcagctggcacccgggttgggggagctggcggggggacagctctgacaaggtgatgacgggcatcctgcggcaggatgcttctggggagagtcaccttcaagagagtgaagggaagtgacgggagctgcctggagtgggggtggggtagagagggacacgctgtcccccagcagcagccctggtcaggacagacctccttctgcagggggacccagggagcctggggcccagcctgggagggtcctggccagagaaagagggggagaaagagagagtgcaagtgcacctgcaggagtgagcctgggaatgcaggtctttgtgactatgtctattttaaagaaccccccacccccgtaaggaagggaatctccatgtgtccatctgggggtcgcatgtccgtttgtacatgcgtgcaggcacagtgaactgagtgtgctgggtggatgtgtttatttccatgtgtaagcacgtgcctaggtgtgcccctattatccccacaaatgtttattgagtgcctaccgtgtgccagactctgttctaggtcctgggagacggcagtggacaaaaccgacacccctgactttgtggggagacaggccatgagctaggtaaataagccgatgaccaaatgcatgagaaggtggggagtgaaggaggtagggctggaggggagggctgggggctggggcagggtgagtccttggaggaggcacctctgagctggggcttgccggtgtgaaggagcaactgtgtttgtacgtgtgtgtgcacatgtgtatgtacatgtgtgtgcatatgtgtgcacatgtgtatgtacgtgtgcatgtatgtgtgtgcatgtgtgtgcacatgcgtgtgtgtgcatatgtgtgtgtgtgcaggggagagttgtgaaggtgagtgtgcacacacagaggtgaagaggaagcacacagggcagatggccttagggaggtggcttgggctttgctggttccgccatctggagccctctgagctgcctggggtaggagactggcagcagccaccactagaataatattcatcatcaagcacctatcgtttcctgggctttcggactcccaggcataatgcaggaccctcacatgcacgctatagtctagtcttcacatcaccctggggtatatatattattgtcaccagtttacagatggggaacctgaggctcagagtgagttagtaactcaccagggtggcaggtcttggaagatgaagagctggaccttgagcctggcaaggctgggatgtgaaggatgctcttttttttttttgagacggagtctcgctctgtctcccaggctggagtgcagtggcacaatcttggctcactgcaagctccacctcccaggttcaagcgattctcctatctcagccccttccccaagtagctgggattacaggcaactgccaccatgcccggctaattttggtatttttagtagagaccgggtttcaccactttgggccaggctggtcttgaattcctgacctcagggtgatctgcccacctcaacctcccaagatgctgggattataggcatgagccaccgcgcccggccgagagatgctctcttgggttgtacagtgtatgaccttcacaagtgtacgtggggaacccaacctggctggctccagagcctagttctgaagactcttctaggctatcacccagccacactctctgaaggtgtgttccatctacctttctgccaagtgatagctggtcggggcgcccccgaggtctcacatgctagcaccactgacatgccatcgatcaccgtgctgtccagggggcctctggtgatgttaggggcgatgcctgcaaacagagaagtggggccttttagccacaccctgggagatgtcccccaagccagagggccaggggcctccaagcccaccgagggccaggccctcatcctccccctgccatggtgaggggccctccacgaggaaggatgtaggcatcttgatggagccccagtgtttggaagaagcccggaggggtcatgaggactcccctatgccacctgccctgtggaaggacccaggtgacaccagtccccacactgcttggattctcaggcctgcatttgggggaaactgaagaccccaggaggcagctcccatcctccctgacaaggttgttggggtttacaagccaaaagtgaaaggaaggctctggcttcttaaaagaaaaacagccacagccaagagggggacttctgccactttctaagtggccctgccccaggagctccattcggccatggccaccgtttagggttggggcagcctcctggctttgcactctccttgccccatcccagccctcaaggaaggagctcgccagatgggcgtgggaacagagctaagttcacctgcacttggaagccagaagcaagacggcagccccttggtagccacctttggggcacacctacaagctctctgccccacagctgccctgtccgcggcctctgtgggtctgggtgatgaacaccgtggagctcaaggagacccctgaacatccccattcttcctgaggagcccaccagtgctttgcatttacacagacctttgagcttatgggccactcacagtatcatcttttttcttttgtttttttgagacagggtctcactctgtcacccaggctggagtgcagtggcgccatcttggcctctgcctcctgggcctgagtggtcctctcacttcagcatccctagtacctgggagtacaggtgtgtgccaccctgcctggctaattttttgtatttttggtagacgaggtttcgccatgttgctcaggctggtctcaaactcctgggctcaagtgatccacccccctcgacctcccgaagtgctgggattacaggtgtgagccactgtgcccggcccacagttatcacctttgattgctaaaaacagctctgggaagcggccagggcaactatggcaacccctgacagagactccaagggcagaaagggatttgcgagcaggagaactaagagaaaaacaccagttttcttctttggaaacatgagcaggtcttctggaatggggttactccagccctgcctgggaacccagggatagtcgcagtgccagagctggtacccgtggttggtttcatagctccttttctcaaaaagccgtgaacgcaacctgggccccaggacattggagagaacttctagggaccagagatttcctccagggctctggactcagggctgcagaggcagcagcggtaactggctgtgcccccaggctgctgggcagcaggcggcctttggggatcctatctgcttaatggaacgtgctatgcacaagaggcccctcggaagaccttggaagaaagctgcgtcctgggaagaggggctcacgggcagcacaagggaaggcccaacttactggtgacagccaggtaggtggaagtttgcacctcgccggctgcattgcgggcgaagcactggaacatgccggtatcatcgggcaccaggccgctgatctgcaggcccccgtcgttgcgctgccggaagcgggtcaacttctccacctccaccacggctgcgtccttgtaccaggtgatggagggcggcggcacacctgtgggcaagacgtgggcccaccgtcaacctgcctcctgcctcctctccgcctaggaggggtgcttgggaggaggccgggcccggaaatctgcgagggggtccctggtgaatcttggtgtctagaaccttctcagaggtgccactttgggtctagggagaggaggaagatgctctttgagtggtaattctcaaagtctttgggacagagtaaagatccgggaatcagtttagcatggaaactggattggacaaactaatttatttattctattttttatttctatttgtgtagagatggagtcttgctaggttgcccagggtggtctagaactcttggtttcaagcgttcctcccacctcagcctcccaaagtgctaggatgacaggtgtgagccactgcacctggcctaatttcttattttttattgcagtacttagcagacatgtatgtgtgctctgggaacctccaagtgggggatgctttcccaaacgaatggcgccctgtgtcgaagagcacgtagagggtccagtgttccctggggggcacttggaagccccccataccggctttgcacatggaggtgaaaggaggaggctcctctcctcgctctcagcctggcacattgttttcataagttcccccagctgggctgggccgtggtggctcatgcctgtaatcccagcactttgggaggctgaggcgggtggatcacctgagctcaggagtttgagatcaacctgaccaacatggtgaaaccctgtctctactaaaaatacaaaaattatcctggtgtgctgatgcatgcctgtaatcccagctacttgggaggctgaggcaggagaatcacttgtacccgggaggcagaggttgcagtgagccaagatcgtgccactgcactccagcctgggcaacagagtgagactcagtctcaaaaaaaaaaaaaaaaaaaaaaaaaagacttccccagaagagttggccacaccctattccaaggagcaccccacggccctgtccccactaagcctgcttgccttcccttcccggcaccctttgatcctgacagcctgtgatgccacatttcatccaatccaccatgcgctctctttcccatggtcacgtctccgagatcaggatgtgtcttataatcaacagcatgtcataatttaattggctgccttttttctttcttagtggtccataaaataatggggcatcttacaacccatggcattttagatgagatgaaataagttctctttatttgtttatcagcttgcccatctccctcccgagaatgttacattctacgcgagcagggatctggctgtttggtttattatgtatctccccactcctgaggacactatcggcacatggtaagccctcaaaaaatatttgctgcctgaatggatggatctttgccttccccttgtggagtctcagaagggaagtcattactcatcccctccagcacagtcctcattcctgcagagacacattttgcccctttgctcagcgtgtcccactgtgcacgctcttctctctttatcatcccggatttcaccctggctgcgggctgtcttttggcggaaatgaatcagaaggaaggacggtggggaaggggaaagtagaaattctccaggaactctttcaaggggggttaagtaggaatagcggagggagctggcagaggagatggagcaaaatggcccaggaaacaggctgagcttataagacacatctcaggtgagatgcacccgggggctgctggttctggcattacggtaatttgtcattgtctacagctctcaaattttgggaaatttgggtctgtcacctgtcctgaaattactgtaagttgggttcatttgtaaccctcaagttttggtaccgtaaaggttgatttccagcctgagattatggtaatttggcctgtttgtttcctggggtgcctgctcagacagccagacagactctctgcctagtgacatggtctcgagaagaagctggaatttagaaatgtccacaatgaggatgggagaggctgaagatctggggtctttgtccccctccagcggtgccacctcattacctttggcctgacaggggatgtccaccaccttctccatctccgcagtgatgtgtctttctggctccttgacaaactgaggcggttctgcaggaggaaggaccaggggagggggtcagagccatgctcgctttgatccagccactgtagggggtcacccttaaggaggaccctcgccgtgctgcccctacccctcaggggagccctagcagccccaccctctctcacccagcactgagaggtaggcgccccggacaacagaggggacgctgctgctgcgcaggacagcctcacactcgtagtagccggcgtcactgccggtggggttggggatggtgagccggcggttgtggtcactgatgccgcccgacagcaataccccgtccttcttccaaatgatatgtagcttgatcaggggcctgcagagggcaagggaaggccagtgttcagccatgaggactcccagaggcctgagaggcagggcagggggtggtaaggagtgtgggcttgggagccgggctgcctgggtttgccaccttcctgccactttgtagatgcaagatcttgggcaagttcccacagggctctgggtctcactttcctcttctataaagtgggcgcatctgtgcccgcccagggggttgtagccaagatgaatgcattagtgccagtgaagtgcttggaacagggcctgctgatggacttggaactcagggcttggcagctcaggcaaagcaggaaagcagcctggcttgcagctcttttttctggtcttccctgtgtgctgtgccccatctgaccacagatcagtgacacggaggagatgaaggtgagggcaagtgacagacagaaacatgaaacacccagagtttgaaaaggggaaataagggcagacaagacagacagacagacagacagacagaaaaacccattccccaactgcaagagaagagcaagggtgtgagtctggcctggctttccaccatcaccaacccctgcacccccaagcccccgagacttgggtctgtccagacactcctgtttagcacctggtgggtccctgaggacggatcttccaaagtgggcccctgctagtgccatgggggtattcagaagggccccatggaaaaggagttctgtggccgcatacgtctgggaaacagcggcttgagtgacagtagcttgaggtgacgctgggcagtttcttcatcgaggggcttctcagggctttcactgcacagttgcaccctggtggccttgcccaagtcctggggtttggatgtgtgtcctctccaagtctcatgtggaattgtgatccacaatgcttggtgttacccacttggtgatggagtgagctcttactctgttagttcatgtgagggctggttgtttaaaggagcctagctcctcctcccctctctcttgttccctctcttgccataagacacgctggctcccctttctccttctgccatgattggaagcttcctgaggcctccccagaagcagatgctggtgccatgtttcttgtacagccagcagagccgtgagccaaataaacctcttttctttgtaaattaccatgtctcaggtattcctttatagcaatgcaaatgggctaatacgccatgcctgtgagaaacttgggatgggaggagcatacttttagaaatgctgccaaaaataacaacaacaacaaaaaaggctggacacggtggctcacatctgtaaccccagcactttgggaggctgaggcaggaggatcacttgagcccaggagtttgataccggcctgggcaacatagtgagaccctgtcttaaaaaaaaaatgctgctacaggacatgctctccctctccaggaagtttcaggtcaaggggacctcagggggatcatcagtctaaccccctgcccatcccattggtttaactttatagtgcacttaggaagggtcaggtcaggctgggtcagcgcgctgcctatgcgccttccgctggggttggtgctcagatcattcccattttacagatgtggagactgaggcccagagggcggcagtgagtacaggcctgggggagagggggcagtgcatttcaactcagctatcatccagctgggtgacgttgggcaggccacttgccctctctgggttctgaagtggtgacacctatgccatacattgttttgggaggaaagaggtcttgtgggaaggtgcttagcaggatgcagggcacggaaggcacttagccacacataatgaggctcaggggtttcataattgtttcctgtgtgggagaggtgagggccgcacatggctgggaagggctcgggtggctcctgacccctgatctgccctactccaaagcccatactcttttttttttttttttgagatggagtttcactcttgttgaccaggctggagtgcaatggtgcaatctcagctcactgtaacctccgcctcctgggttcaaacgattctcctgtcagcctccagagtaggtgggatgacaggcatgtgacaccacacctggctaatttttgtattttcagtagagatggagtttctccatgttggtcaggctggtcttgaactcccgacctcaggtgatccgcccgcctcagcctcccaaagtgctgggattacaggtatgagccatcgcgcccaaagccgtactcttaaccaccatgtgaatcgtttcccatgcacacttccctcctgcacaaccctgcatgcaagagggctcgctttgagaggccacccactccctctgggctcctccaagggttagaagtgagtccaccctccctccagtcctgtacgtcccaggctgacgtccccttccctgtaagttccatccagggcctggttttctcttcttgggctacagagaacaagccagccctggttgtacacagcaaccctctgacaacagccagcaggtctccttgcatccctcctcccctgtcctggatcctcaggtgatgtggcttctggctgctctccctggagcccgcagtttgggagcagcagctggagttacgggtgcgggagcgagggaagatgcactacctacctggcattggccacacactccaaggtaacctctgaggtgccggccaccacgctggtgtttttaggtgggatgatgatggtgggtgcgatggggtctgcaggcccccctacatctggagagagatcagatgttagctgggggcgaggctggaaatcctatccctgcccagcctcattagaggctgatgccctgggaggtctttgtccttaccgagtggagcaggtggccatgggggcagccccagagcagacctccagacactgaccccagggactacctgatccctctacttcctctgttgatgagtcaccacaccagggtccaaggagagacatcgctgaccttgacggccttccccacccctcctgtaaagcagccacacccccctctccccaccaccaccctgtcctgttccattcccttcaaatccttccctctgcccgggttgaccttgttggtttagttctgcattgtccacgtcctccaccagaatgcaaactctctgtacgaggtcaaacagagtcaccggccccctcccccaacacacctcccgccaattcatgcccatctggcacctgtaaatgtgaccttatttgcatataggatcattacaggtttgtaattagttaaggtgaggtcatattggatcagggtgggctcaagatccaatacgactggtgtccttgtaagaagagggaaattgagacacagatgcacagcctggaagactctgtgaagacagaggcagagtgaagagatgtggccacaagccaaggaatgccaagcattgctggccaccaccggaagccaggaaggggcaagaaatgagactcctctagaatcttcagagaagtatagccctgctgacaccttgattttcagacttctggcctccagaactgtgaaaggctcaatttctgttgtgagccactcagctggtagtactttgttgtgcaggccataagagactaaaattctccctgaccaggaacctcatgggtctttgctgtggactgagctgtgtcccccacccattcatatgttgagccttaacctccaaagtgatggcatttggaggagtcccttgggaggtgattaggattagatgaggccacgagggccgggcctcatgagggccaatgagggtcccaaggaaaaagaaaaatgttctcttaacatattgtcaacttttgcttagaaaagcatgtaatactttaattctctcattgaatgaaatgaaagagttaaggatgaaactctcagaaagcaggtttccaggtacttgttaggtgtgtatatttccatatttcagattcatgtccttataaaaagaggaagaggccagagctggctctctctccgccatgtgaggacacggctggaaggcagacatctgcaagctgagaagagaagctgaccatactggcttcccaatctgggacttccagcctccaggatggtgggagccagaacatttgctttgtaagcccccagctgtggtgctttgttatggcaccaagagctgactcatgcagtcttttttttttttggacggagtctggctctgttgcccaggctggagtgcagtggcacgatctcggctcaccacaacctctgcctcccaggttcaagtgattctcctgcctcagcctcccaagtagctgggatgacaggtgccaccaccacgtccggctaatttttgtatttttagtagagacggggtttcactatgttggccaggctggtcttgaacttctgacctcagatgatccacccgcctcggcctcccaaagtgctgggattatgggtgtgagccaccacgcctggccaactcctgcggtcttgacgaccacctctcctccagcacgaagaaggatgcctggcacacagtaagtgctcaaatacgtgtgttaagtgaacaaatgaatggatctagagttaccatcatccaactcccagggtcgatgattgaaatgaacaagaacttcctgtaagtgggttttattggaaaaaaaaaaagagagagaaacactccaaactcctcttctaatagaggtggtagcaattccttttttttatattttgagtttttttttttaaagtagaggccagattttcatcttgatgggtcagtgtaggcccgatattggcataaactccaatattctgtgtatgcctgatccatggctcctgaaaatacaacctctgaggactttttctccacaacaaatctatccagttggcccctttccagaaggttctggaggtagtaggccatgatgacatgctgggccctgcggtgacagtgacaggctgttctttatggggttaggggcagggtgcacagtggccccactgcccctctgggccaccttgtcagccctgggcaggttttccttccttgactccaggccttgctagaaaaggcccaggaagaatgcgcataaaatgtaaaaaataaagtaaaatgaagggggaaagaaaggaagcatataaagcaaaataattgcaacaatataaaagcctcatgtaggtgccataacgagcgatcggattgaaagctgctgatatagctgaatccataaaagtgtgctctaagttgtttattacatgcgggggcgcgcaggtaccacggctcagattaatggggcacaagtaagagacagacagttagagcccaagccagagcgccgcatggcacagccaggtaaacagggagacctcaaggaaggcgagttctgagtttaaaaatacgagggctgccccagggctcagggctggctcgttggctctggaaggaatggaggagagatggccatgtgctcaggcccaggtggcagcctgcagggctcgatgggggctgaggtggccagggatgctggcacagtgagaaagggtcccaggggtgaggaagacctgggctcaaagcctagctctgcccccaggtatcctggtgacttcatcctactgagtttcagtcttctcaggggggaaatggggatgaaagtcactacctctcagggttgtatgaattcaggccccagctcaacaaatctttcctaggtgaatgcttgacacgtgccaggctgtgttccaggcaccagagattctccaccaagcgagatggccagggtctgtcctcatggagggtgatgtcccagaggaagtcgaaccaatgctcgtggggttaatgaatgaaagagcgtgtgatggttgccgggaagggggcagctaagctggtctggggtgactgcagagtgcctggtacacagtaggtgctcaataaatgacagcctcccctcctggagatttgcctgcctgtgcagggaagagctctccctgctagccctagtccaagtgacagactcagaggctatggagaggtgggagtcgcaggctcggggacgcacattaagccctgcagggtaccgggcaaggcctcaggcatttcatggcgtggctccctgggagacagcgggagttgagtgggtctcagagaagtgagtcctggagcagatttactgttaatgaaggtcaccccagcacaagtgggttattggggtaaatggggctccaaaggccagaccatgaaaatcacaggtgagcccgagcaaagaggaggggtgtcttcccggtgagctcctggcatagggtgggccctggggtgggaggaagtgtacggggctccccacacggggggcctcactggatctcactgccccagacgctttgcgtaacagccaggacaagggacatctaacgtgatccatcctccctgaatcacctcattgaatcctcccatttttgccataggcaccaatttacagatggggaaactgaggctcagagaccatgtgacccacctgtgccacctcatttagtcctcccaactttgccataggcaccagtttacagatggggaaactgaggctcagggaccatgggactcgcctgggccacaggtcggtgagcggtggggcaggggtgtgagctgctcccctctcttgggcaggcttctgggatgcctgttctccagctgcccaggagccagggtatccaggccctgtgacctgaaccacccaatgcaggggccatgagccacacgtgcctatgagctcctgcaatgtggctggtgtccctttgatttaatgtgatttaattttaactaatttacatttaattaagaatggatccccaattcagttattagaacacttttaagcatgtacggaacaacttatgcatacgactctacttttcagctataaattttgtgaaatctaaatacagatcacgtatttcgggtgaaaatttcacatccagattgagatgtgatataagcgtaaaatacacaaggatttcaaagacttagtatgcaaaaaaccaatggaagatatcccattaatattctttacattgattgtatgttaaaaagataacttcttgttatgttgggttaaataaaatagagtaataaaatgaatgtcaacgatttctttttacttggtaaaaaaatggggctactggaaaatttaaaatttcgcatgtggttcacattctatttcctttcgacagtgtagccctgatccccggtatccacccaagcatggggttttcaggagctgtgacagtccgaatgaggtcaccagggttatcctgagcagggggcaacttctggggtcaccagacttgctctttccttctctggttctgaagagcatagggtccctataaagaggtgcagaaagctggacttcctggagtccaggagggatggaggaagcggtgcggaggggagagcagacggaggggtgaggcccaggagaggaatgaggggagctggtgctggtggtgggcgaagcgtcaattgctcctcacaaattggttggcaggcaggcaggcaggcaggcaggcaggctggggatttgtgtcacagagaggaagagggttttcaagtgcagtcacttgtggaaagagaaattagctaaaaatcagcggattctgctctgaattcaggataaatcagcgtgtgatggcaggaggccaagaggcagtggggtgggagaagcaggtgactaggcagggcttgggtgggtacagggggtcagaggtgacctgcccacctccctggggccagctggagggttgggtggtttgggatggagcagagagcgaatgactcccaaagtcagacaagaagagtagcctagtttaacgcctatgaggaggagctggatgccggagaaggggaacagacaggaaggccccgactctgtctcagggtaaactgagtcacctaggaggatgcctggctttgacttggaccatgaaccactcctgtgtctttgacattgtctcttaccaaatgacgggattccatgagactccagggaatctgatcactagaaaatatatggggagaagcatctctctttgatgactaaattcccttctcctatagaaacagcagccccagggtatgggctggggcccaggctgctgagacttgactgagaccctgactcgatgtcagaggttacaccctcaaccctgacggtcagtctccagatatacttgtgacgccgatgggtcagtctccagaatgaaactctcctccccgcattcagatttccttctaggcagactggatgctgagtaggggaaggagatccctgggataatgggaagcggttcctgctgaagtgtgaaaggccctggaatggggatggcaaggcctgggaatgtcctgggccctctggacatggacagcagaggctaggatcagaataagagcacagaaaggccccaggctggtccacaccctcatcttgccgctggtgggcaagtaccatcgtgaccaaggatgataaatgaggcttactttgggagcaggagttgtacagatgtggagggaggtgaacatctgcctcccccagcttgtgtgatggctcagctgctgctgaggaggaagctctggcctcgccccacatactctgggatttgggcctacgctgctcctgggctgtccacccctccctccttctctgtcttgggaatggagtatggagggaggggctcgtccagtagggagaaccaggccagaaagaacatcccagcatctcgtccctccaaagaaaactggcttcagtctcggctggacaagcgtctctttgccaaagcacaccaagggaatcacgcttttgtgtgtgtctcactgtgtggtgagttctagggagggctttgcccttttcgcccagggagctggaggtgtctgaggatggaggtgttttaggtgggtgcctgggcagagggcctgtcttcccatcagcagggaccacctggctcccaatatagacagcacttcttatgtgacagccaagtagagacagttagtatatttctgtaaaaacaagcttcagccctgcaatcacccacatgccctcctggtcagcatctgagccccgatagtggctgcaactcacacatgcacacgctcttcctctgccccacccctccctgggtccctggtagccctgctaacagttgtgctaagcatcctctctaccgatgcaggatctcaggcgtgtcatgggaacgggctccagcgttcagctgctcctttcctgcccaggcacccctggctctgctgtgtctcgtcctccttgggaaggctccccccggccgtcccctagcttccctgtccccctcctctgccactccatcttcccaatgatcccctggagcaccattgctaagatttaatggcccgctccaagatcggtcccggccctgtgcgtacttactctccacggtgagcgtgatgggctggctggtcttgttatccccgtttttgtcgttaacagcctgcacatagtagcgacctgcgtcaggggccaccgttgacaggatgacaagggtgttctccagcgtgatggctctgggaagaggaaaaggattcctctgacaggggcctaaggggctctgaacctccagggagtgggagtggaaaccctaagggggaagcccgaccatatctcccagtccccagcctcccagggcccctcctgccaccccctccccaacctcttactgcctacatcccgccacgtttagtttgcagagaatgctaaacacggtgctgatgctgtcaaccagacccagagacagcacgttcatgcccagacgccgaggccacccaaaggaagcttccctggcccctaccccaagactgggcaaggggcttccaggtatccccttggaattctgccctttcccaggtcacagcctccatggctgtgtgtggttatttctgcatgatgtacatccagacactgaagaaatgttctcagcatggattagtgaatgtcggtgaatgaataagtaaatgacaaatgaatgctaatgaatttagaaatgcagggccattccagagtccatgccttaaccctaatcctaaatctgttcaggattgatggactcaaaggccacaggtcacctggtgacatcaacttctggaagtcctgtctcccttcagtcccctttctgggtatcagtttctacctcttttttttttgagacagtctcgatctgttgcccaggctggagtacagtggcatgatcttggctcactgcagcctctgcctcccgggttcaagcgattctcctgcctcagcctcccgagtagctaggactacaggtgcgcgccactacccctggctaattttttgtatttttagtagggacagggtttcactttgttagccaggatggtctcgatctcctgaccttgtgatctgcccgccttggcctccgaaagtgttgggattacaggcgtgagccactgtgcccagtcttttttttttttttgagacagagttttgctcttgttacccaggctgaagtgcaatggtacgatcttggcttactgcaacctccgccttcccggttcaagtgattttcctgcctcagcctcctgagtagctgggattacaggtgcatgccaccacacccggctaattcttatatttttagtaaagacagggttttgctatgttggccaggctggtctcaaactcctgacctcaagtgatctgcctgccttggcctctcaaagtactgggattacaggtgtgagccactgtacccagctggagtttctacctctttgaagctcataaccaagagtgggactaggtgggctggttaggagggaaaaagaggctggtgtgttttggggtgtggtgatgggctgtttacctcagctggtttcctttgctgggatcccatcatgcagccccttctcaggccaggtcttctggcagggaaaaggggcttgtccaagcaggaagctggaggctccatggaatgtgggtgcaatggagccagaagcgccacccacaccggctcttcctccctccacccattctcccaatgacaaacaaagccattagtttgtcaagtatatctctggattttaatgcgatgggcctgagacagctgttaaacatccttaatgttagtttaacaaggacaaatccagttgaattcttttcaaattttcccattaggtgaatgttacagagttttaaacaggctctcaaataaacatccccactaatgcttctccagcccagcactctcccagcccggctgtgctggttttcgccccactctctcctggttttggtgcttcacatgctgagaatcacactcttggcacagctctgggaagcaggaagccaagccctcctgcccccaattcctgggtaccctaatgatgcccccccacctctttttttttttttttttttttttctggagagctcttggctgggcacagtggctcacgcctgtaatcccagcattttgggaggctgaagtaggtggatcacctgaggtcgggggttcgagaccatactgaccaatatggagaaaccctgtctctactaaaaatacaaaattagccgggtgtggtggtggtgcatgcctgtaatcccagctactcgggaggctgaggcaggaaaatcgcttgaacctgggaggcagaggttgcggccagccgaggtcgcaccgttgcactccagcctgagcaacagagcgaaactccatctcaaaaaaacaaaacaaacaaacaaacaaaaaaacaagaaacaaaaaacaggagagtccttttaacctccagctaatgaggcaataggaggtggggccagagccaggcgaaaatatttcaaaagcttaaaataagacagggatagtggtcattttcccacctgagagtttcctgcagggacttgtccttaggtatagcatgtgagggtggctgagagttggaggaggggtcctccccgtgcagggctctggctggggcacggggtgagctctggaatggagctctggccctagcctctaaagggcatgcagcttcctccttgctgggcctcagtttcctcctctgtgcaggggtggaagcaggtattctgtgagatttcttccagcccagaggttgaaggattctgattcctgttgctgcttctgttgtttcctcattaggcccaagatagccctgcagcccgccacctgtctcttcccaccccgcagaccgggacatggccagcttcagggctgacaggattttcatgagcactatgtgccgggaccatgccggcccagctcccccagccacgccacatccatgactatcatagaagcagcttcaagcctccagtgggcacactgggcacagcttggcccacgttccagttcacccacctgtcttaggacccttttggtctccaagaaggctcccacctccaatttcatctctttcttgatcaggaaggctcctttcactgtattttgtctatatcatgatcaagctttctgggtcagtggttctcaaccagggttgactttgccctccagggatgacaatgtctggacaacttttggttgccagctcggggagcgccactaacaataggggtcaaggccgggggtgttgttaagcacgcatcccgtggtgcacaggaaggccctcacagggaagagtgatcaggccccagatgtcaagagcgccatgcctgacatggtctgtcctaggtagagtgtatattaagatggcagagatggccgctgcccacctcagtctcaggcttcccttgtgtcatggactgcagtggctgggaagccagagacagactttgcatctctgcttgcatccaggtggggcagtgaggctgaactagtgggatatggaggaagggatgtgcaccgttgctaagcttggaccatgagcgcctcctgcgcgatcctcatgtctgccccctttctctctggcagagcaggacaacttggaaggttgtgtgctgatgatggcaaaactcctgcctctcatcatggtaggactttaaatggggctgggcacggtggctcatgcctgtcatcccagcagtttgggaggctgaggcaggtggaacgcctgaggtcaagagttcaagaccagcctgatcaacatggtaaaaccctgtatctactaaaaatacaaaattagccagatgtggtggtgcatgcctgtaatcccagctactggaggctgaggcaggagaattgcttgaactcaggaggcagaggttgcagtgagctgagatcgtgccattgcactccagcctgagcatcaagagcgaaaatccatctcaaaacaaaaacataaacaaaaacaacaacaataaatgggcaagaactcaacttctatggtgtgaagtcactgagattttgggctctgctttaactagtgcctggagggaagcaccctggactgggacccccagggcctgagttcaagtcttaaacacagagtggaacaggaggcagagataccttttgacttgccctctctgcgacccccaaaggcagtgaaggaaggtccctgggcttgtggctctctccagaatgtccatctcgttgatagacattcctgggatgatgctgtactgtactgtactgggtgctcttcctggcactcaggagggcttccaacctgcagcactgcaccccagaggcaacccagatggaaagaagctggaggaagaattcttgggggacacagacagcagaattcaactcttgggcaggggctggattccatttttcagccacaccccctggtttcaatgtactaggcttttgctatggctctgattggcccagccctgccctcccttccccccactgctcctgttaatccaggccatttttctcagctccctgcagcccccattgataatttaattatgcatgaaataaattatcctagaatgtgtccaaagcccccagcatgcatctttatgaggaatcttgtctcctttgcaacaatgagcaccggggcatgcatgaggtggtgctaatctctgctcttgccccaccagtgagagcggctctctgtagatagcagcgccttctgtgccctgcacacccctctggcagatagcactcatcagatgtgtatctctgacacacagacaccagggaatttgctgccagggaccttttctgctcacttatgaatattaatttgctgtaattgccaggataaaacccccagagtgttctatcatgtaggtggtaggaatattgcggtggtgtgcaggggctgggggtgtgtgtgaccagggaggtatgcatgtgtgtgcaggccagggtgttctgtcctggtgccacagggttgtgggaattaaaagaggatgaggacagaggcttggaatgagaaaaggaggtgaagaggtgttaggaaagggatgatgggagtaggttgtagaaagggtttcacccaccacaacaaatgtagcaggaaagtgccagcacacccctcatgcagccatggcagacattgctaatcaatcatgatattcattctaatgagtctagatgggacatcagaatccttctcaacacagtgttccaggcagccactaccaattgattggcttgcaataggccatgggaaataacctcagaaagggagctgggatggggctgggactcgtctacttgtcccaaaacctgtgtggagagcattccccttccacagcaaaatctcaacatccacgctaagaaacatccatgctaagaaccattctctgctggttttattgagcattaagttaggcctaagagggcacactctgactcacacagcatgagtcccctgttaacctggggtgccactccaattcttcaccctgctctgtatccacactctttgtcccgtgactttgcaggtcctgctgctcaaggaacagagtctattttcctacatcttgattctgagttctgccatgttcttgctttggcacatgggatgttagcagaagctggaaaagtgtatgttcctgtgcagcacagccaagtcaccccagtcacccagacaagtcagccagtcccagacaagtgagagagcccagccaagaccagaagaaccacccagccaagcccagcctaaatcaccagcctgcagactcacaagaaaaagaaatgtgtattgctctaagccactgagctggggttttttttttttttctttttttttgagatggagtcttgctcttgtcacccaggctagagtgcagtggtgcaatcttggctcactgcagcctctgcctcccaggttcaagcgattctcctgtctcagcctcctgagcagctgggactataggcatgtgccaccatccctggctaattttgtatttttagtagagatgggattttgccaggttggccaggctggtcttgaactcctgacctcatgtgatctgcccagcttggcctctgaaagtgctgagattacaggcatgagccactgcacctggcccactgagctgttttgttacgcagcatatctgtggctgtgggtagctgatacatactagcatggtggttcttaaccctggcttcacattagaaccacctggggagcttttaaaatttctgatgctcaaattccatcccatttcaattaagtcagagagtcttaggatagagcccaaggatcagtacacagtcacgcactgcataatgtttcagtcaaaaacagaccacatatatgatgctggttctataagattataatgaaactaccttatacaggtgtgccattaaaaaaatcttttacaccatatttttgtggtacctttcctatatttagatatgtttatttatacaaatacttaccattgtgttacaattgcctacagtacagtaacatgctgtacaggtttatagcctaggagcaatggactacaccatacatcctgggtgtgtagtaggctgcaccatctaggtgtgtgttcacacaacaatgaaacagccaaatgacacatttctcagaatgtatctctgccattaagcaacacatgactgtatccccaaactcccaaatgatttcaacaggtagctacgttgagatactccacagggcttgttccccacaaacactatcttttcatcgagtctgtgaacctgttttcaggcacttttcacataatacaagaattaaagaacctgactccggagttggcagggctggatgcagctccagtgctgaccagctgtgtgagatttggcaaagtagttaaacttttgggaacttcacttgattgcctgtaaaacggggagaaacccagcacctcaccgggttgttgtgagggtcattcattcaacaacgcctcctttctgcaggtgctctgcggactggaaggagaacgagattgagagcatcttcttcctcacagagtgtggctgtccggaaagagaggggatgtgtgtggtgtgcttagctcagtcctcaggacatagcagccattcaataaacggcagctgctattatgatgatggtgatattatcattatttgagatggagtctggttttgtctggaggctggaggctggagtgcagtggcccgatctcggctcactgcaacctctgactcccaggttcaagcgattctcctgcctcagcctcctgagtagctgggattacaggcacctgccaccatgcccagctaatttttgtatttttagtagagacagggttttgccacgttgctcaggctggtctcaactcctgacctcaagtgatcagtccacctcagtctcccaaagtgctgggatcacaggtgtgagccgccgcgtccggcctgtgatagtgatattattattattgttattgttactatgcttccttcccccaactagacttaatgctccccaaaggcaggaaccatccatctacgcctccactctctacagagaccaggacaggctcagtcctgtgtacacgcagcctgggtagatcagaaggtggtcttctggaagcaggggagagctggagttggaaagaggagagccccagctgcctccagacccgggggtggctcaggagggcggggagacgggtgtatctcgggaggaactgctttgttgctcgccttctgcggaggtgtggggtgttggctccatcctcctgcccacaggctgggctgccccagccaatcccagggggcacacagagacggccttgtgaacactcagaggcctgtgtgtttctctgcccagggcttccctggccacacctccgccgcacagccaagacacacacagccctcacacaccagtaaacaccctgccaacggacgcgcccagggcctcccggctgcccaggagacgccagcctctccaaggtcccccagcgccactggcctgagtcctgggcctgtaaccacggtgacagcgccttcgtatatgcctgtttgggttttttaagtgctctgaaaagcagatttattctccagctgatggtggaggcaacgccctgggattccccaggaaggggaccgggcatgggtttcatggtcccaagtccttgcctgtgcatcctaagaaagcccctgggaggtcccctacctggctgtgtcccacaggagctgaaaggggcttctgcacaaaggccctcctccacactcaagggagactttatctggccccaaacctcctcccccagacacccctcccctccccgtcccctcagagcgatgcactcacatgcggctgctgggcgggatcttgcggccgtcccggaaccaggtcacctgtggctgggggaagctggcgatgcgcggggcacggatgacagctgcttctccgtgggagacgctctggtgcttctcaccttcctcaaagctccccatgtctgcagccgggacaacggcagtaggatcaggggcgggaggtcagcctcagggactgcccagctcccaggttgggagtggtggctatggacggaaaattcggggcagacaggatgaccacagggaaggaggacaccttgctcgggccaccccattctctgcctcaccactagcaccctgccctaagctactgtctccattcatatccctatatccttcaatcggccagttcgttcaaccaccctgagaggttggtcatcatttcacacattttacaatggaaaaaactgctcaaatgggctccgagaggttagttaacttgtctaaggtcacctaactaggaagagacagagtcagaatttgaactcggaccttaaaccctggagtcaggctatgtagctcctcctcccctgccctacagtgtgcccttcagcatggcgggggttcctgtgtgaggtgaagggcaggtttctgtgccctttcagggagagaagtgtgggcatgctgagagaatggggtcttagatgcttgcaaatgggtgcagacagcgtttctctcctgcgccttgggtgtgtagtgtgtagtgtgtgagtttgtgtgtatgtgtgaacataaataccatattgctcttttaaaacatgccactgccttggcagataaggaggggaacatttatcctggctctgcctgccaggaggtaagcacagagcagaggagacgcgggtaggaaactcttcagccagcctgccggcctgccggggcgggacaagggggtagggagactaattccaacacggaggcttggagatagggtttgggaaggggtatttgtgtctctaccacacccttgaaaattaatggacatccctgttactttgattgtggcccatgggcaggtgcctaggcaccacacctgggcacctgtcagaaatgcagagtctcaggccccccaagacctgctggatcagaagcagcattttagcaagacgcttggcaagtgtgtccatgttcaactgtgaggagcatattatttgtcccaaacttgactgtgtgtcggaaccacctgtagaattaaaaaatgctgatgggagcctcacccccaaagcttctgatttcactggcgtggagtgtggggatgggagacatctcacatcattccattttcttttctcttccttccttccttccttccttccttccttccttccttccttccttccttccttccttccttcccccctccctccctccccctccccccctcccctctcctcccctcccctctcctctcctctctttctttctttctttctttcatctcactctgtaacccaggcttcaatcagccaagtgcagtggtacaatcttggctcactgcaacctctgcctcccaggttcaagtgattctcctgcctcagcctcctgagtagctgggattacaggcacccgccagcacgcccagctaatttttgtatttttagtagagatggggtttcgccatgttggccaggccggtcttgaacttctgacctaaagtgatccgcccgcctcggcctcccaaagtgttgggattacaggtctgagccaccgtgcccagcctacatcaccccaagccatcactaggatgtgcctggacctgtgcacagaattcccacgtgcagaaagatttcacactgctgactttaggcctttgtttccccattgcctagcagatccctccctaaccaagggggccgcatcctaagctaccgggtcccctcctactgcattgggtgttatttctcaactcctctaagaccactgactcttcttcctctccttctaccaggaattctccaacctggctgcactttagcaaccttgaggaccctttaatattcccagaggtgagaatcttttggggtgtgtgggctgacctcagtatttgtttattattattattttagagacagggtctcgctctatcattcaggctggagcacagtggagtgatcatggctcactgcagcttcaacctcttgggctcaagcaatccttccgcctcagcctcctgagtagctgggactacaggtgtgtaccaccatgcctgcataattttatttttaatagaaacgaggtcttgttatgttgcctaggctggtctggagctcccaaagtgttgggattataggcgtgagccactgtgcccagaccagacctgagtatttctaaagatgttcaggtagttccaacgtgagctaaggctgagttgggtgggtctcagaatctcctgagacttggcaaactcacaaaggtgctcaccactctccttccctcccaggcatcccccagggcacagaaaggcccgtctggctctctgagtacctgattcactctcttggtttgcagattctgtcacacaatcgtttgagaatgcgggcctacaagttcattttccaaagccctagtcttgattctctttccagccatgctggccccttggcagcttcacttggcctaatggtttgaccacaatctccctgcaaatgacacttgtgccttctgctctggctctgccctgagctctgagatccaatttccaacagtctgttgggcatttctccaaggagggccctccgtcacctccttgccaagctctccttgcatcctaagttctgttaaaatctccccttggccgggtgcagtggctcacgcctgtaatcccagcactttgggaggctgaggcaggcggatcatgaggtcaggagttcgagacaaccctggccaacatggtgaaaccccgtctacactaataatacaaaaattagccgagcatggtggcacatgcctgtaatcccagctactcgggaggctgaggtaggagaatcgcttgaacctgggaggcggaggttgcggtgagccgagatggggtcgttgtactccagcctggggcaacaagagggaaactccatctcacagaaaacaaaaactaaaacaaacaaacagacaaaaaaactcccctcatgccctgcaaacccaatcacctaagctcaaacccctggagcctttggtggagcttcccttccctgcccccaccaagcctttcaacttctctgggacattactgtcatttaccaaggtccctctggttcctccagccttgccaatgggctggccttactccagctgcacagaccctgggatatgcctcccaactccagatccccttctgtccatcttacacactgttcttgattagtttttctgaccttggagcctttgggaactcctcactgccctgggaaagtctaaattccctggcctggactcaaggttcttccctaatctgaccctagacaacctttcttgccttaatgcccacaccacgtcctgccacctcccaccccacggcctgtattttggctgggccactgcctggaatgccaccagaggaagccaagagtcaccaaggcaccatggttctacagcatcctggaaggatgtagtcaattaagtgtttcaaaagatcaaatctgctgctggcatccttgttctatacttggtagacagtgtgtgtaatggtaatggctttggagttttttagacctgacttcaaatcctagttctgtcgttccattactcattagccatgatgctgggtagatttctttcttttttttttttgtagagacacagtctcgctatgttgcccaggctggtcatgaactccggccttaaagctctcacctcggtctcccaaagcattgggattacaggtgtaagccactgtgcccagctaggacaaaacttttgactttgtcaagccttaatttcctcttctataaaatggagttaagaagggctccttcctcacagattgtactgagtatttcatgagatgatatgtgtatgtcaggctgtgtctctccagggatggctgcatcaatattttgctactattcacatactctttttacagtatgatggacattcctctcactgacagatggggcacaggtcaattccccttgaatctagggaccttgtgactatttgaccagtagaatgtgcaggaagtgatgccatgtgacttttgagactaggtcatcgaaacgatacagctgccacctgactctcactctctatactcgcccttggaatccagtcaccatgttgtgaggaagctcaatctagccgaagcagatgtgggagcagcccacatggagaggaactgaggtcagatgacagccagcaccaacgctggacatgtgaacaaacacgtgcgccctgagaggacttcagccccagccttcagccccagactgagcctcaactgaggcctcagtcatcccaggatagagtcaagctgcccttgctattctctgtccagattctagagccacagaatctgtgaacatgataaatgattgcagtataccattatgttttggggtagtttgttacatagccatagaaactagaagagtatataaaagtgttaaaaaattgtatctaatatttgtagtgttaaaatattggaagcctacatatttttcacagcttagtttaaacatcacctcctcaatgaagtttacccaaaaccattcaaatagaattcaaaaacagagcagttgagcacttaccctgccaagaacttctttctaggtagatttcccatgatccttacaataacatgacaatctcaatttaaataaatatatgtttttagttgtttattaatttccattacttggctctgtctataaaaaattacatcaatgaatcacattgatttcagttcttaaaataattttatctacttaaaaaacttttcacagaactcagaagatatatttgaacaatttaaagcaattttatggtaatagtgtttctttctcctctctagttttattagctccattttgctggtgaggaaatgaaggctcatggagatcgagtggcttatgcagctgtgaacactgagggccaggttcagtccatgttcaccctggccctccccatgccatccctccctgcctccttcctgagtcgcatcctgcattgcaatcctgcatacacattctttatctctttctatagatgctaagccttgagaggcagtcacattcagaagcaaatcctgacaagacatctgggcctgtgccctgcacacagtactttctaagttcactcaatgccagcattcaccacttccctatggagcccctactgtgggccaggtaggctctggggtaggcactgaaggaagacctaatgcctgccctcttggagcttccagtctggtcagggagacaggaataagtaaatcaacccaaaagcaaacgtttggtgatgtctatgacaactgtcgaaaaggagggaatgaggttcttcaggagaggaatagcaggaggacctacttcagactgggatttaggtgaggcttttcttaagctgagtaggtattccctaggggtgtatatgggaatgggaggggaagtacgtgaaggctcagaggtaggagagaaggggttcacagaggaaataaaagaaggccagtggggcagtgccatggatttgttcagtggatggatggatgtttggatggatggggggatggaaggttgtatgggtgaataggtggatggaggaaagaatggaagaatagacagagggatgggtggatgaatggaggaagggcagaggaatggatggttgtatgtatgtacatttgtatagtggtatggctgttgtatgtatatatgcttacatgtatgtatgtttggatggtgggatggatggttgtgtttgcttgtatgcctgtacgtttatatggtgggatggatggttgtatgtagctatgtttgtatgcatgtacatgtctgtatggtggaatggatggttgtatgtatgtttacatgtatgcattattgggatggttacatatgcatgtatgcatgtgtcatgggataatggttgcatgtatgtatgcatgtatgtttgtatgatgtgatagatggttgcttatgtgcatatttacatgcacgtgtgcatgtatggtgggatggatggttgtttatgcacgtttgcatgcatgcatgtttggtgggatgtatagttgtatgtatgtttacatatatgtgtacatgtatagtgggatggttgtatgtatgtacaagtgtctatggtgggatagatggttgtatgtatgtacatttacctgtatgtatgtatggtgggatgcatggttgtatgtttatgtgcatgtgtgcatatgtggtggaatggatggttgtatgtatgcatgtatatgttttatggtggaatagatggttgtatgcatgtatgtttacatgtatgaatatatttatggtggatgtccatatatggatgcatttggtgggatggtatatatatatacacacacacatacatgtttatatgtatgcatatttacatgtatgcatgtttacatgtatggatgcatgtgtggtgggatgaatggttgtatatgtttgtatgcatgtatgtttgtatggtgagaggggtggttgtgtgtatgcatgtttacatatatgtgcctgtatggtgggacaaaggtatctacatgtttgcaagcatacacgcatgtatatgtggtggaaggatggttgtatgtatgcatacacgtaagtttatatggtgaggtggatggaagcaggtagggcacagctggccttggtccaggttctgcagttgcccctttcctccacttctccactccaacatcttcccacctcactgtggctctcaggccccaaggccctcacagtctctccattgtactttgtcaaatgtgcttcttggatctgcccagggagttccttgttgagcaggccatgggtgaatgtatttatacatacatatgtgtgtgtgtatgccccacccacacagccatgtatgcactgaaccacagcagcaagaggctgctaagaggcggtctgttcagccagacagtgcaggagtgcaggctagaggcgagaagggagggtggagacaatgacggtgataacggagactgaggccccacgatcccctgggaaaactcactcacactaaggcaaaaacagttaagggcttgccacactgactccccgaggtacctgcttgctaatacgccgtgttatgccctgcagggctgatccaacattcccaagaaattcccccaagagcaaagaagtgcaggcctggggcacagtagaaggtgctgaaaattattcctgatgtctttgtcatatcttaaaaggccttgtaaagtgtgcattccacttcagaatatatttcttgcttttatgtgtttacttaaaaacattttaaaatcatgaaatatgtcacgcatacaaaagagcaaatataattatatgtatagtttacagaagaataaaataaacactcctgcacctacctcccagctgaaggcctagaacactaacaatacctttcccctaccctggatctccccccttccccggcaccaggtgatttctctcctgaatattgaggtcatgtgcctttgctttcctttcacgtttccttacctagagatgcaaacttacacaatttgtggtcaatgtattctgtttttaaacattttacacctgggattatcctgtatatagtcttccgtgatttgcatttttgtgcaacatttttttgggggggctccatcctggtccttgcccttcattgagtcattttcacggctggatggaattctgtggatcacgcttcatttgtttttggtgctttgctgtcctgccaagagcagcctcacacatggctaagagaatctctaaggtatgtgcctagaaatggaattgtgggttgtggggttatacacacattcattttactaataacgtttgcataaaccccagttggtatcaatttaccaacttgacgccagcagccatgtgagtttccaccaacacttggtgttgttagactgtggtctctgccaacctggtgggcacggaatggtactttgttgtggttttatgtgttgtttatcatggaaacaaagctgctcacttcagatcacttcatgcctctgccctcgaccacccatgacttctctctcattccaagtagcatcctgatatggtttggatttgtgtccccaccgaaatctcactttgaattgtaataatccccatgtgtcaagggcaggaccaggcggagataattgaatcatgggggtggttcccccataccgttctcgtgatagtgagtgggttctcacgagatctgatgattttatgagtggaaattcccctgcacaagccctcttgcctgccaccatgtaagatgtggctttgctcctcattcaccatgatggtgaggcctctctagccatgtggaactgtgagtcaattaaacctctttccttataaattacctagtctggggcatgtctttattagcagcttgaaaacaggctaatacacagccaaagcactgaccacagcttagaatgccgggatctgtccccaagttctctccttccagcctcaccatcttccactttctgcttccccactccacttcagctacctggcctcagacacccacatctgcctcagggcctttgcacctgctatctgacctggaatgatctcctcctctgtctacatggtttacccccaacaaccttcctttgagactcgattccatgtcacccgctcccaatggccaccctccaccatcatatcaaataagacccctgccccatcctccaaacctctcgcccagcttcatctctccttagaacactttagtttttgtcatgggccttatctataacctatatattatacattcaccttttaacttttgtttctcttgctactttcttcgagggcagagacgtgtgtcttggttttgtctctcgttgtgtccccactgcctggaacagtgcttggcatatgggggtgtgcagcaatcattgtttcctgagtgatttgaatactcaggtaacatgagtgctccagaaagacacattgatgttatcaggaactgtcacttggcccctaagcatcctgcattcaatacccacacctcaggctgaaaatgaagagaaacaggcctatgggtggcattttaggattactcctaacccacatgacagcgggcttgttcccctccaattgtcttttgtaggagtggctgctaagctgcttggtaggaaggaagctggccagcctcccaggatggggcaggcgctctgccctgctgtgggtgggtgggtgcgtgggtttggtgctggagtggatggtttcaagtctgagtcccacagatgagggctgggggaaggggtcaggaggtctcacccaggtgaggagaacacagaggtgccctcaggacctggatgtggtgaaacgctggctgtggtgaaacgctggctcgaggtcctctgccacctccggaaggctctcccaaccctcttagccattcatcccacatgctgaatgctggaaatttatggtgacttaaaaaaacacaaagaagagactccaagtggggacaggaaggggctggggaggggggaagatgttttattgacttccccttaattgctgtaattaaaaacatgtaaagaatccttttttaacgactttgccattatcattagttgttagcacagctgccttattaatttctcattagaacccaattcacagttctctttgggaagggggctgggtgccaggggttggccagcctggctccatgataggagaactggctgcttagggccccaggacaagcccttgtcaccccaggagacaggaacagccaaggaggggaggggcatttgggaaaagtgaccataccccaccctctctcagaactgtgtgccatctgcgtgtgtgtgtaaggagacagacggattggcagacaggcagctgcagcaggcctgaagcacagaatcctgggagggccccagactggggtagggagaggggactgaagtgctgagggtgaaagatttaaggaggcacccactcttggggtcatgcaagtacggggtgagcacttgagaatgagcacctccttaaattgggcaccctcactgcctggtttgcctcagcctagtccagccctggagagcaggagtagagagggtggctaggcatgtatctacttgggtagacagattcaagaaggttgtttcttccaggacacctttcctggctgacctaaagtctatttctccctgagtgccgtccagtctggggacccactgcaatggtttgtgtgcgttgataccataatcctttcaaccactcaggtcagtccgtactcatggtagcatcctttgttatacaaacaatgaaaaccaaagttacagagaagtaacttgcctaaggtcacttgtgggaggtgagtcgggatttaaagccagggctcacagctggggccacggttacaccctgccaggcagaagaaggtagacagtggaactgccagctgtggaactggaactgtgggttattctgcaacccctctgagccccagtttgctcctcttatgttcctcaaacgatttgccttctaacctctcagacctgtcctgggagcccacagaagaaagacatttacacaatggcacagcaggatggatcattttggaggctctggggaacgccccccccccccggcttaggctctgcatctttggggggctctgggcttctttgggggacagttctttccaggctgggccccatgggtcatgaccctgaaggtcactttaaccttgttaacatcagaactgaaatggatctcattttacagatgggaaaactgaggtccagagaggggaagggaggtgctcaaagtcccaagctagtcagtgcctcggttggggcgagaatccacgctttcggacctccatccccaagacatgccgttatttcaggcacaagggccatgcctggcacacggaagaaccctggagctctgtgtaggtacttttcatctactcgtcctgctgagagcaaggaaaacgatgtgattggtagagtctaccccaccccacccgctggcactagacattcaccctaggtgggagaccctgtgcatttgcagagctgtttggacatggattattacagcccagggctgtccctgattctgtctgaactctgaccccagcagctcaccctcaccctcctcccacacacccaattttgatttttctcttcttgtcctcaagcagtagagtggcgctgttttggaatcaggcagtcatgggttcaaatcccagtttttcctaactgtgtgacttagacaaggtgtgtcacccggccgagcctcggtttcctcatctgtaacatggagatggggacttgcactctgcaggctgggacgagaaccactgtgcccttcccagcacagtgaccctcaggacgagcactgctatgagtgagaatggttttgccaagtgctgtgtttccctaggcccagaatcccagggaagtggggctgggacagaggattcttcagcttctacagctagagagggaggccccctgggatgaggccagtgtgtccagcaagggcatgaatgggggaggtatgcttctctccttcccatcctggctgggtgaaaccttccttagcttgtcaggaactgcgttcttctcaagggtcggaaggacttcctagggcttttctaacttcctggctttagggcccaaagggctgtggactgtggttaccacttcacgacattatggaggaaacagcttcacacctgcaaagccgtgcacagtagcagatgcagcttcccagcgctggtttcagggagctgcagctggtggacagggggaggttaacctgggtctctctctctgctcccccttcagccactccaaggtgtcctattcctttgccaggggccttacccatatgtgcacagctgggcagcacagcatggtcctggtggaacgcagcaacatccatggtcttaaccatgtctgggggcacctggagctctggggctttgagggggctgctggaacagggcaggaatcctactgtgagaggtagtggaggggcagggccgggctggcaggatggcaccggggaaggtgccagcctgctgcattttgctgggacagcatttactgaaggctattctgctctgtggcctgcttctctacttccttaaggtgataatatagagtattaattgcagcagtcactcccactgatgcagggtgcactgtttgggagctggctagacgctttggcacatatgagctcaagaaatccttccaacgagcctaggaggtcgatattattaatacattttagggatgaagaacctgagctggggtgaggctcagagaggtccagtcacttccctggggtcacacagcaatccaggacagagcaaggatgtgaatgtggtctgtctgactccaaagtccactctttttattttatttatttttgagatggagtctcgctctgtcacccaggctagagtgcagtggtatgatctcagctcactgcaacctccgcctcccaggttcaagcaattctcatgcctcagcctcccaattagctgggactacaggcatgtgccaccacgcctggctaattttttttttaattttttttttatttttagtagagatggggtttcactgtgttagccaggatggtctcaatctcctgaccttgtgatccacccgccttggcttctcaaagtgctgggattacaggcttgagccaccgcacccagccttatttttatttttttttgagatggagtctcactctttcgcccaggctggagtgcagtggcatgatcttgtctcactgcaacctctgccttctgggttcatgcgattctcccacttcagcctcccgagtagctgggattaaaggtgcatgccaccatgcccggctaatttttgtattcttagtagagatggggtttcaccatgttagccaggctggtctcgaactcctgaccttgtgatctgcccacctcagcctcccaaagtgccaggattacaggcgtgagccactgcacctggccagaccactctttttattaagccacactgcctgtcatggtgatgagcccccagcctgccaacactgtaaggcactacccgcaaagccctttcactgtcaccctggagctcagcaactccctggatctcagaagctccctcttgagccaggcccccatatgtcactgccactgagggtcatcactgccagcatcacccagggtggtccagggcccttggaacccgcagtgtggggaaggggaagctcagggtacccccatccccagggtctgtgcctgggcagaagcaggtgtcagggtgttaggcagcacaagtccccttccatctgcttctcatggcctggaagtgcccagagggcgggcccaggtctgtctgagcccttctctgcagcacctaggaaatgccaggacctttgcccatgatcagtgcaacttgcttgctcgccctgcagatgggcctggtcacacccctcccccagtgtgaaggtagaaggacctgtgggtccaggggaagggaccacacacgtgtctggcctggtgtggagggagttccccccaccctgggtttgtgtgtatgtgggaaggagtttgcctaaggagggggatcaaggagctgagtctgggctcagggattcctatcacagccatgaagagaagcatttcagccacagaaacactgacctcccttcctttctctttttgattggcagagccaaccccagggaggctgtgtcatttcatctcaggggctctcaactccagaaagtttctactgtctcctatgagccaagggcttggaacttaccacctactcccaccccacagcctggactaaatggcatcctgaatggcatttgcgactgcgcgcgcgcgcacacacacacacacacacacacacacacacacacacacacagaggttctggcccacacacaggtaaacaaagaggcagattactccagacatgcacatctgaacacataaccaatacatgtatgtgtatacacttgcacatactcaaatgcacacacatgaatacatgcaatgcaagggcacacatttgcactcactcacactcatgcttacaatacacattctctcaaatacacaggtgagaggcagactggcaacagaaacatatacccaagcacacatgcatgcatgcatgcaaacacacacacacacacaaatatccttgtgcacacacccgcacatatacacactcattctttcccagacacatgtgaacaaaaaggccaaccaacctggacacagacatttgcacacacccatgcacacaccttggcacacactcatgcacacacacatatgcagtctctctagaggcccagcctcagcttccccctgccccctggactctcagcactgactaagcgaagctcccggggagccctccagccgctgacagctgcctgagatccatcactttaattcagggctttttctgctccttggagtaagttgagttgccgttagtgctgatttatggggacaatccatcctccacttttgattacggttgttttccgtaattatcataaacactctttgcctcacttgagattttcttttagatttctctcctgcacttctctttaagtagcaagctctctcttgtgctaatttagaagcatgctcccatgagctccatatgagagggtgccttaacaaaaattctggcctaaggattgccaccctgttatgtcccacagtacaacgtgggacttctcctcctaggaaaacccagaatgcaacagcccataatgagcctcatttctagaagacagcagatatttgaggaagccgggacagggctgggaaggtaacactgggtcttaggggaagagtgtcggttggtactctaggaccctggcccctgagatgccctggggttcttctgaagctgtcttcccttcctcttcggagggagatcctctggaattggcggcacgggggagaaggccgttacccacaaaggcttggtgagggcctcccacttcactctctgccccccagcctttctgggaaccctgattcattcctcattctccccttccccttggagtttcagcattcaccatgaggcacctcccagcacccccggaagatcacggagaccctcaggctgttatcactccagggttgagcgagttggaggatggaaaataaaagtcatactgggcgcggtggctcacacctgtaaacccagcactttgggaggctgaggtgggcagatcacttgaggtcaggagttggagaccagcctggccaacatggtgaaaccctatctctactaaaaatacaaaaaattagctgggtgtggtggcacatgcctgtaatcccagctacttgggaggctgaagcaggagaatcacttgaacctggaagcggaggttgcagtgagccaagattgcaccactgaactccagcctggatgacagagtgagactccaactcaaaacaaaaacaaaaacaaaataaaagtcatggaggccctgggaagtctgctgagaagagggttgtagctggagaggctcagagtggccattctgaagatgccccttcccaggtgtgaggtggaccacagaggaggcattggaagcaggtgcaaggcccttttttgaaacacaaatcagctggtcccatttaaaggacacagacaaggccacccttgtctaaaatgaatgaaaagcaccagggagctcttggctctcgggacatgtgatggggtcacagggtcagcagatgtgcatgagacttacagctgcgtgaccttgaagagggcctgctacctctctgggccttggttctaccaactgcaaaatgaggttgctggctggaaggggcaccatgggcactcagtgggtgttgatggccatgacgggatctggctctgcccaggatgtggctggtgggtgccactctggcaccacagtcgccccccctgcccctgggtccccattgtactcacaggccacctggacctcggtttgccgctgcagcagggcccccattcggttccgcacgatgcaacggtaaaagccagcgtgggtgcggtccaggctggtgatcatgtatctatgggacagacgagacagccagtgagcaagtcaggcagctgcaggggtacagaggtcagattgggctcagaggtcagaggtcgccaggtcaccctcttttggaataagagtaccagggaactcttgactctctagccatgtcataggatcacacaaaggtctttatcaataaataggagggttcctcccaaagccaatgaggcctttgctcagctgcctgggaattagcctgcccttctccaagcagggaaggtgctgcacccgaatccttgaccctgaccctaaggctgtgtcagctgtgttggaagcagctattctccctgacctgtgactcacatgactgagaaaggtgggggcatttttttttgtctttgcagaggactgtgctatattagttgaaatggatggaggtgacagagacagggaaatttacatgttttcccaaatgctcagtatcattcctttcttaaaattacagacagcccctgatgcccacccaaatctcatcctgtagctcgcataattccaagtgttgtgggaggaaccaggtgggagataattgaatcatgggagtgggtctttccatgatgttctcgtgatagtgaataagtctcacgtgatctgatggttttataatgggaagtttccctgcacaagttctctctctttgccttctgccatccatgtaagatgtgatttgctcctccttgccttccgctatgactgtgagggctccccagccacatggaactgtgagtccattaaacctctttctttcgtaaattgcccagtctcaggtatgtctttatcagcagcgtgaaaacggactaataatacagctgcactgcagcttttgggctggcggggttgggcagagccttctgaataagacaagctagtgttctgtgggttctggggacaggatgtgggactccaggctggccccttgaaagcccactccagaaatacttgttacccacagagcagcagactctggcattggggggcaggcggctgggagcaggtgtatgtacattcacctagctgagaggcaaggaggaggcacgtcagtgagaggagcttctgacagtgggacaggagtggatgaaggggaccggggtccaggggctagttctcctggttcacccttggtggtcacctttcccatccctaggcaatggtcccacaggaccctcagaggaagaagggatgtcctaggatgcctctctccaattcattggtatcctagggtttgcccagcagacctggtggacaagttccttgacacctgcctctagggtatctctagatgtgccaaccctgggatgcagcagccttattcctgggagatgccagtttggttttattaatacatgagatctggctagggcctgtcatcatcatcatcttgccaagaataaaacaacaaccaccccttccggagcaccatctctgcatcagacactgtattaagtacttttcatacgtttcttcatttcacacagcagttcccagcctattgaatatcatgaaccagtaacacttaaaaaagtgggaccaacatgagactgtgaacttcttcttttgccaagattattaaaaccaaccaaccagaaagcaaacagacaaataatcaggcaacaacaacaaaaacacttaaaaagggataatattaaaaagtgccagggaaagaaaaataaatagaaatggtcagcatttaatttaaaaaggacatttctgggatgacaaaaaactcctaatctcagcataaaggcattttaaaaacatttttccttctttatattaaaaaaagaaactttttgaaaaaagagatgggggtctttctatgtttctcaggctggtcttgaattctttggcacaagcaatcctcccacctctgccttccaaagcgctaggattacaggcatgagccaccgcacccagccaatttttaacaaatttttaaacttaaattttacacaaagcccactaccctgacttttatgaggacagttgcaaactgtcatcagtcagcacttgagagcctgtgacttaatctccacactaaccctactagcaccttctttctagaggtggagaagttgaggctcagaaatatcttgtcagtaacctgtaagtttcacacattgtaagaggcaaagtcccacagagcctttcagactccaagcctggctgtgaagctgaggtcacatcccaagggccccaccctccatcctgggtctgtgcagggctgactcacaactggccacgtgccaagttcgctctggctctgcagcattttccagaaccttctggctgcccaagccccttatctctgccaccggctgcagctcttatctgtctcttgctactgtgcgcagtgtgatggcggggagacagcagtgcccaagctctggtaaatctctcttcctccgttcacctcatcttcaaatccaccctcagccctctctcctgtttgcgtcccctctctcccgaggcgaggggaggccactgtgggggaactgtctgagtctgtaaagtgatggggtgaccctagaggggagatggaagaagagatgggccggaaaagctctctgcctttggaaatggaatcagatattattaaaaagcaccagagagaggaaaagaaatagaaatggctgataaactcatgaaaatatgctcaacttccgtcatagtgaaagaaattcaaatcaagacgacaagaccatgtttgcctagcagatcatcaaagattttcaggtgtggtcaaacccagtgtcggcaggagtgagggggaggggaaagtatacctgcagtactgttgtggtactggaaattggtccagcctttgggaaaaagtctatgaaaattagaatatgccagctctttgactcagaggttgtgctcctaggagctggccttttatttatttatttttatttttttgagatggagtctcactcttttgcccaggctgaagtgcagtggtgtgatcttggctcactgcaacctccacccaccaggttcaagcaattctcctgcctcagcctcccaagcagctgggattataggcacctgccaccacgcccagctaatttttgtatttttagtagagatggggtttcaccatgttggccaggctggtctcgaactcctgacctcaggtgatccacccacctcggcctcccaaactgctgggattacaggcgtgagccatggctcccagcgagctggccttttagatacactagcaactatgtgacaaaaaaatatgtgcaaggctgttcactgtagcatttgcttgccatcgcagagacaaacaaacgaaagctagaagcaaactaaatgtccatcaaaatggaattggatcaataaatgatgcagcagccacagaatgaacacatgttatgagaggaggtaggaaggtgtccaagacacagagcatggaaagaaagtaagagctggggaggaggggaaggtttgcgaataaaagcacgcgatagcaagatgctaaacaatctcatagttgactgttagggacaagaatgataatatattcttatcggttgctgttcattgatacaggctaccaaacccttaatgttttacatcatacaaactggtccaataaaaatccccgcactttgggagaccgaggtgggcagatcacttgaggtcaggagttcaagaccagcatggccagcatggcaaagccccgtttctactaaaaacacaaaaattagccaggtgtggtggcacacgcctgtagtcccagctattcgggaggctgaggcaggagaatcgcttgaacccaggaggtggaggttgcagtgagctgagattgcaccactgcactccagcctgggcaacaaagactctgtctcaaaaaaaccaataataatttaagtttgttgcaaaaatgcaaacaaacaaaaaaaaggtaaagaatagtgtgatgacatgatagtatttgctatgatgccatttgggtaaattgaaatagtatatatatatttctgtgtattgtgtgtatacaaatacacaagcacaaacgcacacacttataaccacacaaacacactgggataggcatacaattttttcaagacggatactccagaatgtgttatctcccttttgggagagatacccgggatggggagggaagaaacttctattttttgattttatgtctttctatgccatcagaattttctttatcgtacgcatatattgcttttattttaaaagtaaaataaaaagatgcacattgtgcacataatttaagcatacattataaaaacggcaccaggggctcattggatctggatttgtttgctgatgtcagtgaggcgtggtgaaatttaaactttaataaaagcccatttctttttcattttttttattttttagagacagggtctcattttgtcacccaggctggagggcaatggcgagatcctagctcactgtaacttcagactcctgggcttaagcgatcctcctgcctcaaccttccaagtagcgaggactatgtctatttgcttcagccaggaatacccaggtcccagttagggtctaattagggccatgaggaaggcccgtgggctgctggccccctcccctcccccaggccgccctctgtacccctctgcgatcgagggcaggtaatccctgccccagcagtgcgggtacaacctctctcccgctcctccgcctccgtttctttgggctgtctctttggtgctccctgcctgggagacctatttctggcttgtaggcaacattatttaaagtaacagttccgcccactgcctttcctaccagggaaacccacttcactccacccaaattgcagctctcgtctccctgcctcccaggcgggtggaagaggcatttggccagcttctcggtttgtgagtccagcgcactgtaagcacctccgataatgacagtaacagcactcattatccccaatgcgctccctcctgggccaccaagacacactcagcccacagctctgcctgccccactcacccgtagctgccagcccagcaggagactggctgagtccagccccatccaggtcaccccgggggtggggggtggattaaatggctcctggaggagcagcagggccggagctgaagggtccacacctgatccactcaagaggaagtgcagtgttggagaaggcaccaggacttccacctcagggggacttacacttgactttcacttctgttctttcttagatgtgtggcccaggcaagttatgggaccttgcaagccttagtttccctgactgtaaaatgggaataatgatggccatctttgatgtgggcatccagcgaggccgtggatacaaatgcctgcacaaatgcttgccaagtgaaggggcaaatgtaagagtcattggcggggaggctcagagaggagggtgaagcagaggccctccccctagaatggggatcctctaggggcttcagccaagcactaggggagcatggagtcccctgcctggcacattcctcggcttctgacccctcaacctcccagtcacctccatgtgcctccttgaggtggaagagcaggaacctggctcctccagggatgaggaacagtgacggtggctgggtgacctgcaaccttaatctctattcaacgaggaagagctgctgggttgtggcctctgggagccagcacacacctgcattcacctacccctaggtcctttcaaaggactgctctttatttatttattataggaaatatattcacaattcaaaattcaaagaaaagaaaaagtacacagcaaaacgtctctcccacccttgtcccccagctgccctgtcatcctgatccccaacatacacagggaggaaacgactgtcattagtttcctgagtgtcttttcagaacttctttatgcaaatgcaagcaaatacgcatttagaatccctccccattataaacaggagacatggcctcctgtaggcactgttctgctccttgctttgtgcaagtgacaatgtatctcaaaaatctttccgtagctgtgcatggagcttcctcgggctttttgacagctgcagagtattgaggaatcttccgggtggaggaagatttgctttctcccagttcaatggtcaaaagcagcaggcggtagagagagcacctcaggggctgggcttggggctgggggcagaaagagggcagtgaaggaagatacgccaagaatccacacccgttctcgtcatctccatcacagattgtcctgattttaatccggcaggaccctgcggctcagtccactcttcgaagatgaagagatgagctcagggtggagggcgcaagacaacagtgggaggaagagccaggacagataattggatttttagcgacaagagaggagcaggggggacaataacagcctaacaaatgtggcatcttctccagcacatgaggaaacacacaatgccctttttggttcgagtccttgagtgtcacagttgatatttaaaatgattcttactcgcattaaataagatatttcaattccacgaagctgtcaggagctgatgcggacaccagaaataataggcacactctccttgtattgtcctcgttaataaatcagacgcctggagatgcacgcggtgatgctcccatggaggaaggaggtgtgtgtgagtgcacatgtgcacacttgtgcacatacacggagcacactcatgcatactcacccatggtacaacgcacattcatgcacgccgtgctgtgcacacacatgcaaactcatgcaatccacctccctgcaaactcatacatgactgtgcacatacatttgtgcacacacatgtttggatgaggcctcctctcctcaagtgaactgtgctcaggtagagaaggcaggtgggtcatcatgtccactggggggtcaggggaccatgtgtgcctgctgcctgcaggtgtcgccccagatgtctgaggccaacacaggttccaggaacagcagtgggccactgagctcgggaacccagatttccttccctctccccatggacttttgggcagcaggcaggagaagcagcaagtgctgagcatgtgcatgtctgtgcgtgtgtgtgtgtgtgtcctcagacacctgtgagcacacactgggcctgttcctgcagcaggaagacttaggtggtgatcgaggacctggccactggactggtggccggctagaaaaagactgactatatttgtggatttgcttttgcaaagattcttcaggaaatcgggcaaaactctgtccagggcgatcaaaagggaaaagaacatgtaccaggtaataaataataacaatataccattatgcaattaacataataactattattataataaatgtcactgctctaaggactttatattttttaatcacattgctgtaattgtattttattttttaagtcttatttttatttatttatttttgagacagagtctcgctctgtcacccagcctggagtgcaatggcacaatctcggctcactgcaacctccgtctcctgggttcaagcaattctcctgcctcagcctcccaagtagctgggattacgggcacctgcccccatgcccggctaatttttaatattttttagtagagatggggtttcgccatgttggccaggctgatcttgaactcctgacctcaggtgatccacctcctttggcctcccaaagtgctgggattacaggcgtgagccactgtacctgacctaagttttattttctttatcatcacccaggtattaagcctagtacccaatagttatttttttctgctcctctccctctaggactttaacgtatccactcatctgatcctcacagtactgcagaggcagtgctaacataaacctcggttcacagatgagaaaaacggggcccagagagagaaagtaacttaccccaggtcacacagctaagtacctagaatgatgggacagtctggcccattgacaacatgaacctaacgggatatgtatccgatggcttggggtctctcattcctagggtaagaagaggatagttcggctgtctacctcctcctgcttcacatagacagaggcagagtatttctgggcagggcctaaattttgatctaggccatgttaatcaaaaattgttgctgagtgctggccagtctagtacactggaggcccaggaagaaggagctggatggcttgggcagcccctttagtggatcttttgattgtggaaggagaggctcaggcatggaaagggttgaggcaaacagagctcacctgttcggtatgatcaagtggctgtaatgttgaatttcccttctggtagcagccctaaggatctgctgggggtgagtgggggtgaaaatgagagacagagacagagagagacagtcagagagacagagagatctagggagaaagagagagagacagggaggctgagatggagagagacacacacagagaaacagagtcagagaaagagacaaagagagacaggggacagagacagagaggtaaagccctctccccatgtaggacacagccagaggccgggtagttgggagcaggctggccagggagggtgatgtcagctgcaccctgtggtgaggacagccagggcacctcaggaacagcaatgtctgtttttctattttaagcagtttctgtcctgtgctgtaattcccctcccacatcttcggtgagagttggtgacaggcacagcctgttctgtggatggtacttggggaaggatgctgtgctcctggctgggaggctacagggccgccatttgaaggggaggcagcagcctcaggaggggaagggttaggggaagatccggaattggttctggagcaggcactggggaggggacaggcaagcccaggcgagctgagcacggggttccagaatccttggaaggtgggggagggccctggacttgtcccctcccagaggacagacactgggatagggaaggattctgtgtccctcggaggaggggggacttgggcacagtgtgttccccccaccttctagggaacctgagggtggagagggggtacccgcagtggacagaacagggaggaacccctgactctgatgtgatggttaattttaggtgtcaacttgactgggatgaaggatgcctgcccagacagctggtaaaggatggtctgggtgtgtctgtgagggtgtttctagaagagatcagtatttggatcagcagatggagtaaagaagagagagacagggagacagagaaacagagacagagaaagagagagacagaaagacaggagacagagtggtgaaagccctctcccctcgcaggacgtagccggatccctcaccaacgcaggacggaaccatccaatccactgagggctcggatggcacaaaaaggcggagggaggaggaatgtgctgtcttgggaggagatgcccatcttctcctgcccttggacgctggggctcctggttcccggcctgcagactctaggacttacacccatgggctctcggtttccaggcctttgggcccagactgaattacggtactggatttcttgggtttccagcttgcaggcggcagttggtgttcttggctggcctccataaccacatgggccaagtcccataacgaacctcgtgcatctgtctctctcccattgcttctgcttctctgcacaaccccgactaatacaccgaccgtagaatatgggagataggccgggtgtggtggctcacgcctggaatcccagcactttgggaggctgaggcaggaggatcacctgaggtcaggagttcaagaccagcctggccaacatggtgaaaccccacctctactaccaatacaaaaattagtggggcatggtggcgtgtgcctgtaatcctggctactcaagaggctgaggcaggagaatctcttgaaccagggagttggaggttgcagtgagccaagatcacatcactgtgctctggcctgcgtgacaagactccatctcaaaaaaaaaaagaagaagaagcaggtctgtctcctgttggttctggttcctcatagggctgagcagggcaggatacagatgtgtctgaaagcggctgctcagccgaggcacaacctggggcttgcacaagcacctgctgctgggcggtttgcttcataaggggaggagatgtctcagggcctgctggccaccactgagcctcccccgctttgccagaaaagcccgtgaggctccgattgatcccccggccctgcggtcaatgagaggatggcggtgttatcgagctgggggccgctatcccggtgacagctctggcttgcgatggctgggggaaggcgtctgtcggccctgggaccttctgggccaattaagtgctctcaatgaacaaggataaggacttcattaaactgtgatccatcagcccagtggtccccacagaggtctggctggatgagaaagcaaaggagagagctgagggagccagtgaggtgagatgagggcaggacagggctgggagcccaagacggctactcctcctgggtgagcgggactcccactgcttgagaaaataagcagggatccctccctaaataacaaccacagtagcagcatcgggttgtgagccaaacacttgacacacgctatctggttcattcccaggtcaactacaggggaagggactcctcttcccattttacagccaggggacctgggctcagagaggttgagcatgtggcctgaagtcacccagctaggaggcagcaaagtgattccctttcaggcccatgtgaccccatccgtgctcctgccctatacctgcccgccctgacccgtcctggggccctcaagactgctctgcggtaggtcttctctgcttgtttttgcttcacaatccagaaagaaattcctctggggagctgcccaggccttgccttgatgcaggagctgtgtctgagcccagctgggagagagccgctacatagatgggaggagagtggggcgacccgcggacaactctgcaccgacacaagacagaactttttttttttttttttttttttgagatggagtctcatccttttgctcaggctaaagtgcagtggcgcgatctcggctcactgcagcctccctggttcaagcaattctcctgcctcagcctcccgagtagttgggactacagatacgtgcaccaccacacctggctaatctttgtgtgtgtgtgtgtgtgtgtgtgtgtgtgtatgtgtgtgtgtatatatatatgtatgtatatatgtatgtatatgtgtatatgtatatatatgtatgtgtatatatatgtatatatatgtatgtgtatatatatgtatatatatgtatatgtatatatatatgtgtgtgtgtgtgtgtgtgtatatatatatatatatatatttatatatatatatatatatatatatttttttttttttttagtagagttggggtttcaccacgttggccaggctggtctcaaactcctggcctcaagtgatccacctgcctcggtctcccaaagtgctgggattacaggcatgagccactgcgcccagccagacagaacgttttattactaggagcagaaaggaatgaaaaaccacagaagacaagccctgtccagggtataaggagttaaaactcagtcttcagtttaaatggctgggaaaaaagaaatgctgagatttgagggaggcagtgtggttattttattttattttttaaaaaacaagaaaacagaaaagcaaaatgaaaggagcatctcctctcacctcgattacaattgtgctttagaatttcctcaccgctccccgctcctccggctcggggaggaaagcctcgccacccagctcccactcctggggttggggaggactcctttgtcccgggctcctggcacccggctgaaattctttatgattcttttcatgccaaggtggatcagaaagaaaccaaattaagacaagctgataaagaggctgcatggaaaccaggcttcagggaaccaaggggctggggctctgtggccgaatcatggtgggtggccagagcagccccatggacccacttctccgggctcactccagcctcccaggtgtgcaggggagactcagttgcttctcaaactgggagaagcggcctcctaataagacctgctgaatgcacagtggtgctggctgagaagcctcttccctcacagtgagtgggttccctgatgcgagaggccctacttgtttgagggaagcaggacactggggcatccaggggcgtatttgtttctcagggctgctgtaacaaagcaccatggcctgggtgccttaaaacgacagaaatttcttcttccacagccctggctgccaggagtctgagtcaagctcagcagcaccatgccctgcatgaaggatcccagggagaatccttcctgcctccttcagctctgggggccccaggtgttccttggcttgcagccacatcactccaatctctgcctctgcctttatttggtgttctcttctctgggtttctctcctcccccacttttctttcttaatagagatgggatctcactatgttgtccaggctgatcttgaactcctgggctcaaatgatcctctttctttggcctcccaaagtgccgggattatagccatgagccactgtgcctgggctctcctgtcttcttaaaaggaccccatcgtattggctttagggactaccttagtctagtatgacctcagctgaaccaattacctctgcaatgaccttatttccaaataaggtcacactctgaggcactaggcgttaggacatcaacatatatttttagaggagacacaattcaactcataacagctgaggcttgagccgtggggtgacttagagatgggcgggacttggtagggtgtgtgtatgtggagaggtgggagctgggcctctccacctccctcctgagggcaggaaggctcaggtaagtgcaggtgctgatggaggctgagggggcgagggaagaaaaggaggaggtgctgtccagtgctgatcctgaggggaaggcaaggatggttgaagagtgccaggcgtgataagtagatgtcagagacagagattcctgagacatcgactgtggtgctggccagagaaagagcctggctgggataacggggaggctggacttcatggctgggccagtccccaccaggccttatgggctgggctgaagaatttgggccttttcctgaggatagtagaaatatgctgagggtattaaccagggctataaaacagagcttagcaaactatattcatgggtcaaatctacagccacagcctctacaataggtgtaccaggaagaaagagttcacacatttttagcaaaatataacaatatcaagtgtaatgtttcatgtcagatgaaaattatatgatattcaaatttctgtatccataaatagttttactgggacacagccatgcacatttgtggacacagcgtctgcagctgctctcctgctgcacaggcagagttgaaggttgccataaactgtgtggcctgtgaaccctcaaacattcactgtctgtcctggaccagaaaatgcttgccaacccctggtgcaaaataggcaggtttacatgtgtacgaaggtcactctgactgcagactggagagggaactggagttggtcaaggccacagggttagaggccaatttggtctttgccatagactggagagaggtgatggggctgaccatgtacaatgatgctggggggccaggggacagtggaaagatgtcactggtgctagcatgagggggcacctgatggtctggggtaggcggcagtttcagtgggcacagctggcaaggagaggaggggtctggacaggtggagaatgcaaagttgtgtgctaaaaagaggagagtggctcccggcaagagagggaatgtggggcagagggaagtctataggagggactttggtttttaaagatgtgagacttgagcaggtttaaacattggtggtgggagcagttaggagaagtagaggctgagagcagtgactcacatctgtaatcccatcactttgggaagccgaggcagggggacggcttgaggccaggagtttgagaccaacctgggcaacatagcaagaatctatctctaccaaaaaataaaacaattagccaagtgtggaggtatgtgcttgtagtcccagctacttgggaggctgaggaaggaggattgcttgagaccaggagttggaggctacagtaagctatgattgcaccactgcactacagcctgagtgacagagtgagactctgcttctaaaaaaaaaaaaaaaaaaaaaaagaggcagaaagagagggcaagtgatggagccaacagccagctcctgagggtctggggtcctgtacccagtggagtgcagtccctggcagaaggagaggcctggtagggcagagttaactgaagcagggtgacaggaagtgggagaaatcaattccttacaatgctcctacttcctggggaagggggcagtgaagggaggggcggtgggctggcggttcaaaacagcatctgttgaggatgagtaacctgactgggaaactgtgggaaggcacaggtgagggcagtagcttgactttgttttttatttgttgcttttttgagatggactctcactctgtcgcccaggctggagtgcaatggcgcaatctcggctcactgcaacctctgcctcccagatttaagtgattctcgtgcctcagcctcccgagtagctgggactacaggcacgcaccaccatgcccggctaatttttgtatttttagtagagatggggtttcaccatgttggccaggctggtcttgaactcctgacctcaggtgatccacccgcctcagcctcccaaagtgctgggattacaagtgtgagccactgtgcccagccagtaccttgactttgtacaggtgctatctacacaggtggctggctttcttcagcagggctcagtagccttatggaaggagcaaggtgggttgaaagttgggctgacccaaggctggggctcttccaggaagctgtgacagatggaccccaatgccagggggctgaagacactggcaagagggaggctgagatggtgatgactgggtccactggctggggaagcaggttcagccagcaggcaactgacagatggggcgggagggccagggtaagaggtggaaggcgttccacagccctgctgctcacagtgaggtgtggggaccagccacaggagcgtcacctgggagcgggtcagaaatgcagaatcttgggccccaccccagacctgctgatcagaatctgcatgtgtggtgttcccagggtgagtccttgcacacacaactttaccatgctctgtgatgagatggagccacgggtgtgagggagatgggaggtcagaatcaaggcttcaaatgggaaacgggtctaggtgatgacggaggtcagggtgctgcctcatcggtcctcaggttcccagtctgtgagatgactttgatcatagttaatgaaaaggctgatcatagccccaaagagtcacagtctttaacaacctcggctgtggcttcagacaaccctttactctggtcccagctctgtcactcactgagcacgtgacctcagacaagggatagaaccttgttatacctcggacactccatctgtataacgggcaaagtaaggatgactgtccctttttttttgagacggagccttgctctgtcgcccaggctggagtgcagtggcgcgatctcggctcactgcaagctctgcctcctgggttcacgccattctcctgcctcagcctcccaagtagctgggactacaggcgcctgccaccacgcctggctaattttttgtattttttagtagagacggggtttcaccgtgttagccaggatggtctcgatctcctaaccttgtgattcgcctgccccaacttcctaaagtgctgggattacaggcatgagccaccacgcccggccaagatggctgtcttatagaaaatacaagttcaggcagctcgctgtaaggcttgttttcaaacacacatttgttccactgcgattgatatattagagaacgatatgagcatctgtggattttgcatttgctgtgcacagttttgtctgcaagaagcaggagtcaatacagaaaattgcacccagctgaggtgggatgcacagttgtgcacaaaatgcacacagctctggggtccccagctcactgcaaatgttacacacccacacctggtgttgcaacttttttttttttttttccaatttccgacaaccttccttctaccacttaacagtaacttataagctgcaccccttctgacacccacttccgcaagcacactgggagccttttccaaggcaaagtgccataagtattatagtagttatgcgtttcttaaccatttaatatgtgtaaaattgtgcaattatcttcattaagttcctttcttttttaatgtgttgctaatgaagtttttgcgtgttgctgcccccactccatttcccccgtaagccctttgttttttatcgcacagtttggcatagcatggtgatttctaccaacgtatccgtcacacagcagcagaactgactgcaaagtgcttagcacagcgcttgacgttcggtaagcagtcacgaaatgtgtccttatgtggtttcccactgttatgaatcattctacccatactggagctacaccatgccagacactgtgttaggcactgggaattagcagtaataatgacaacaacaaaagcaatagcaatacccttgtctccatgtactgtggtatcagcagctgcttgtgtttaggtgaaaacgttactgctgctgccacacttggcttagaaatgcactgttccccagctctacttcgagtccattcatttcctgttgctacccacgaagacaatagtggtcagttccctggaggccagagggaaggagttaaacatcaggtctttcagcatctccaaatcccagggaccttaagggaatgaagacttggtcatctttggggaggaatgactttgtcaagctaattcatactacgattggaggtggcggggtaagtggattggaagcattaacttggaggggggtaccaggcagggattggtgagttgtgatggcatgaaccctgccaagcaccgcccagatggccggagcttcctgtcccgctgagtcctgctctctgggattcaccaggctctgggtttccttagaccagatgttccaggattactggatgttgataaggctggaggatgagccacagtctccaggttcttccctataacgagcttggtaggtcaagggatgctggaaagaggccgccctggtgtgcctgctgttggcagccctgcctgaaggccagcattgaccctctatatctgctgcaaggcttcaggtgtggctgaggctctctgctctgggatctgtatctatacttatgcccaccgctatatcatcaatgtctatttcaacctaggtagagtagctaactttaatttggccaacaaaaaagtgaaacaacaaaagcaaaaaatctgtcatgcagatttcattttctttgttaaaaaggccatttttaacatcaaaagaggacaaagggcacagagttttctgcaaagagtggatttaccatcatgagaacctgccacgtggccctggttttgactagttcacagcagacttcttacaccaccaccccgggccttcctccacgactgagcaccagagcttgagaactgtgtcctttctcagagccgccctgctctctggggttgcgttctgacttttttggcggcctgtcttgacttccctagcaaggctgcaagctccacctgtttttggagtgcccctggtacctgacactttgtctaactcacagtgggtgatcaagaagccggggcaggcccactgcttgcagggctggagggcaccctgataaagcacagcacaaaggcgtcccaagtcaaactactcggctttgctctgcccaggtagctctgctctaagggatggtagacacaggtggagaaggagggtttttgattgggtattccacttgctgtgtgaccttaggcaagctgcctaatctctctgtgcctccatttccttatctataaaataggagttgtaacaatacttactaatatgggccaggcagtgttttttttttttttttttgagatgggtttttttttttttggtcacccaggctggagtgcagtggggtaatctcagctcactgcagcctcgacctcctgggttcaagtgatccccccaagtagctaggactacaggcatgcaccaccacacttggctaatttttgtattattattattatgttttaagagacagggtcttgccatgttgtccatgctggtctcgaacccctgagctcaagtgatccaccaccccttggcctcctaaaatgctaggattacaggcgtgaaccaccacacctggccccaggcagtgttctaagcatttcacatgtgataatgcatttactccttattaaccaccctacgaggtcagaaataataatatccaaatgtggcagataaaaaagatcaggaaaccaaggaacaaagatgttaaggaacttgcccaagtttgcatggccagtagttggcagagccccagtgggcttctagattttgtgctcttaaccaccctactatagcccctacctgaagatccagtgtgaggattaaatgagttaatacatgtagtgtgcttaggatatgggctggcgtaaggcatagtcggcaatctttaagagttagctgttgccattattattaatgttattactactccttcatctgtccttgctctcagcatcctctaacagcaccctgacatggctcaacatatccttatctaggacaagccctggcccagcaaagcagcctggggagcttcagtcccaggtgtcagaagctatgaccctggctgctgggagccttacgccccagagccaactcctctctctgcctttctgttttttggcttttttttttttttttgagacagggtcttgctctgtcacccaggctggagtacagtggcacgatcacggctcactgcagccttgaccgcctgggctccagcgatcctcccacctcaacctctcaaggaactgggactacaggcgtgcaccactatgcccagctaacatttttatttttagtagagacgaggtctcgctatgttgcacaggtctctgtgcttgcaagcgtgagccactgtgcctggcccctctctctaccttcctcaacgtctgctcagatcacaggcagcaggtcccagattcaatcccaccagctctgagctttctgctctttgtcctccgtgactcagttccaatccttgcccattctctctgggtgttccaaagtcacccttgcgggtgccttcagagataccaagtgggagaattggaccagaactgtgctaaggaagcgctggggacccgcctgcgagccgccatctggaaaaggtggtcggtgtgggctttggggtaatggccagatctgagaggaggccaggaggggactgaggagcacagctctgatattttacagtgacccccatcaggatgtggagtccatttccccactcccgaaatctgggccagcttcatgcctcgctttcattgacagaatgtggtccttgtagcttctacattcaccctctaagatcagggccccaacaccatggtggcccaccatgctaccaaggaggagaaaccacgtggagaaagagatcctgcacccagctgtccccaccaagcccagcccaagccgactgccagatgggcacaacttcatggccagcccaggagagaccagggggaataataatcccggttgtttaagccaccgagtgctgatttggtttcctaagcagcagtaggtagctgagcagagtagctatctgtggcccggccggcacgctcctgcaggcaggacctcactgtgcactcccaggcccatggtgtttgagtgccgcggtggctggagcctgtggatgtgctgtgggttggcctccagggactgtgccctatctcccctggagagactgtctctcttagtcactagtcttcattctgcagaaagaacagcctcttccttctccagctgtctgtgagcccaccagtgcctggaaccccctcctatgccttctgtttatcttgagttacagaacacaccagcatctctcagcccccaggggctgccagttagagccaaaacccctattttcaaccccctcccaggaggagtctctgccatcccagcggacttgggcgaccctgggagaagactggactggtaagtcagaaaccccagctcccctgccaaatggcccactgcagatattcctcttcagggcgacgaagacacaggggagaggtacctgcaccctcccacactgaggaatcctatgaatgggctgggggcggggaggggagtcaggcgccacggcagcccccaggaagcaggggtcattaccaactccccaggcgtctgtctagaccatttgcctgcctgagcgcataactgagtcaagatctaattagtttctgtgtcctggctgagagccaaggccgggcgcaggaggacctgggagggggtggaaagcgggagattctcagggtaagcggggtctccagcccagctgtgtgcggaaaaagaatgaactctcatttccatgcactgaaccattccagataaaaaacatatgtgcctccgatggagcccaccctcccctccccaaggactgtgggccacacatggcctgcacccatgtctgtgcacccgttaaccagggattcaggccaaattcaaatatgtcaatctcaggtgatgaatgatgaaacccttcctaatttgcatgttaaatttccttgtggtggaaataaatagcctcagttcatcagggaagagctttcctcgggagcctttcattaaaggcggcggcgagtgcttcatttgcatgttctgtgcggcacattggagagtctgggcggatgtggccagcggggccccagggctgccaggatgggccatggaaaatgcatccgttgctgggaagtgggaggagatgacaggaagaagtgagggtgtggctgtgtgtgcgcacctgtgcattccagactgttccatgcagaggagctggtggcaggtccacatccctagctccccgctaatttgcagtgtgaccctggacttgtcactttacctctctgggcctcagtttctgtatctataaaatgggaggcattaagtgttttgtattaagtaaaagcaaagcaataggtgttttggatcctcacagccctccttgtgagaattaaatgcattaacactaatgaaggcatgttgtgcatggctgtgtgtggggtcatgctctgtggactatggatggacatccagagctgtgcatgggcacacagggtgcttttgagagacagcagcatcgccctgcctgccccagcttcagagagctccacagtttcatagaaatgtcctccccgtcccacctacagctctctgtgggctgtgacgtccttgtgtgatcctgcaatcaaacaaggacaccgagggaactctgcaaacatctcatcagaagagagaggtgaggacagaacatgtgacctggggatgccgggcctggcaatgttcccatccctgacccggcgagtccctctcctgttcccaggggcccagcctgaccagggaaatgacactgagtgaaattgatgttggcacctttgcctctgatcacgccaggatgctgaggagctggggagcccagtgagatccaagcagcactgcacggagactcagggggcctgggtctgaattttaattctgatgtgaactcatgccatgtcccccaaggagtcatttccactcagggccaccatgtcccccctgtaagacagggcttggcctggatgccagctgaggtgttctgtggctgcgtgactctctcatagctcctagtttcccctgcctgccccctgcaccggtgtcctcagcccaggtccagcgaggccacacccatcgtccatctccagcttcctcgggagtgggggacccattttctccccaagccaggacccgttacggagagtgtgagcaaacaggttgctatggaaaccaagccagtcacggtttgagagacttttgcatcttttttccgcctttccccttacactttgaacttattagtcttaattgacataatttttgcgaggttgtcaactcaaggcacaaggagccagctgtgcctctcgctgcccagcaccagcactgacccttggggatgctccctgctgcctctctccctcccatctgccaccaccctgcctttccctgctactgactagcaaatcctgaggccacactcggtcccctcatgtcgggaagaacctgtcctaaagcaggagggggcctcccaggccagggtgggggcacgggctgcgtgcaggaccgcgtgcatctgtgggaagcaggtcgtaaggagcaccaccccatgtcctctggcaccagtggcctcaacctcttggctaatggttttagcaggactgatcagaggaggcgggagtgaatcattctctctgagcctctgacttctctgcgcagtggaggtgttgtacctgccccgggctgaggatccaacagagcatcaaggaaggtggcctgtacagcaggaagcgccttctagttgaattgttatgagaaagggggctggagggacccccaagagggagcgaggggtggccagccagctctttaccccttccttccatgccaggaccctgaccccatgtgccagggcacctatgcacagaagggcagctcagctccagctgggagagtccaggggatgccagcacctcactgtaggtcatggttctcaatgggggtgctgttgccccaggacacaggtggcagcatctggagacatttttggttgtcacatccagaaggtgtctattgggatctaggggttataggccagggctgcctcttaacaccttacatcacgcatgacagactcccaccctccaacaaagaactttccatcctccaatgtcagcagtgctgaggctgagaagccctgctctagctgtttctagctggtgccttcctcccaggcagcataaggctgtggcctgaggatcctcaaatagtgataccccttgcctcgccctctgcctcgctgttggatattggaggcctgccccgtgtgtgtgtgtgtgtgtgtgtgtgtttgtttgtgtatgtgtgtgtgtgcatgcgtgctatgtaggcagatggggtcccttcagcctccccaccttccccgatcctcaggagtgggaggagctggcctcaggtcgggagaaggacagcctgctcctcctcccagcccacctctcccattcctccctgaggatttcgccatttccaaactcgttaacttttaattactaccttccctctgcctgagtacactggctccatgccacgtacatctctattaaaattcaatttatgcccatcataactaattcctgtacttcagttttctcaccatcagccttcaattttcagacaagatgtccaagctcatggccaaattggagtaaatctccaaagggctggaacaggcagataggatctagcctcattgaggaaaaggaacctggacttcccgggagggtgggaaggaaccgtggccaggaagaatgaggtgggaggagcctgccctgctgggtgggagtcagcgtcatgcccttggtggctctcagaccatcctttccattgatggagccatctgtgaccagacactcttctgcacgcttcatcttgcatgacattcccagccaccctgggaggtagctactggtcttattattcccatttcccagactaggcaaccgaggcagggattaggcagtttgctcaaaggcacacagtgagtcaggggcaggactggacatcacaaggtgggatgctggggctggatctgggaagataaacaacggtttgccaggtagcagaggcgtgcgaggacggtagaggtggaggacagaggtgggcatgggcacgagggcatgaaagagcagagaccacgggtgcacgatgcgttctgcccattagcgaagggagttagtgagagaggaggctggacagatggacaggacccggtgatacagggtcttgtactccctcgaccaaaatcctttcgagactgtccactgcctgctggatatatccgagaagattcttcctggcgttccaggtcctacctctgccatcttgggtcagccatgtctcccacttcctagggcaactggctcaacctgtcatgccccttccagtctccaattcttgattcctacttgcctgtgaggattccccctccactccctgccccgacttgctcatccctctctaactcctcaacttgccccatcctccccctcctgaaggtcaccagacttctatgtccctaaattgagctgacgatttatttatttgtttttatttatgttttgagatggggtctcgctttgtcgcctaggtaggaatgcagtggtgtgatcttggctcactgtaaactctgcctcccaggttcaagtaattctcctgcctcagcttcccaagtagctggccttacaggcacgagccaccacacctggctaacttttgtatttttagtagagacgggggtttcaccatattggccaggctggtctcaagctcctgacgtcaggtgatccacccaccttggcctcccaaagtgctgggattataggcgtgagccactgcgcccagcctgagctcatgattttggaatccagcagcggttgacacagttggtccttcctaaaccaagaacacaccctctttcctcccaagacactgcaatctccaggcttcccctctcccatccagcctctaggttttgttctgccaggctggtttccaactcccttatatatggcctggtgggaccacagagccctttcctctgatgctatgttcattctctcatcctgccatgtcaacaccagtgagtcctaaattaatatcttcagacttttcttctagttgcctgttggacatcccgatccagcatccaaaactgagtacagtgtcttcccagaaagctccttctccgcctgggattccttcctcaaccacctcaatgcccatcttcctccctctcctgcatggccagcagagcctcacgtcccaccagttatccctcctcaatgcatctcagacccatccgctcccaccaagatggcccagccgcccctcgcagcacaatggacccacacctcctctctgctctcttccacccgcttctcacccagcttcctgagcaaagatttgaaacatgagcatctgatcatgtccattccctgggaaaaaccattcgagggctccacatagcttttggcagaaaatgcaagtccctaagagagctaaacgcccctacttgatctcgccccagtgtcctccttggccacgtggaccttctttcagatcctccagacacaaggtccttggatggagccgcagggaccattcctttggcatccccctgccctggctacctccactcattctctgggtcccaacttccccagtggaatctgtttgaccttactttcccttgaaagcacgcatcaaaactggatccacccacacttgcactattatttagttctgcttctacacatgggggccaggatcttcctgtcttatttaggaccatatcaccagcagccggtatctggtcacaaccggcacccattgtagtaacccagggatgctggcgtctcctgacacgagcacctccttctctcacggtttgtccacactactcaagttctgtgtctcccaggtgctgctccaaactcctccagctcctgttcgcctctttctgcctcttcctgaaactcccacgctcacttggcctcagtcccctgctgttgctcctcagccatggtacttagagtcctgtgagcacctctagctccagtgagaacaaacatttccaaaggtggcagggcaggcggggctggcactgcctttccgattgtcctccttgcctagctctgtgccgggcaggcagaaggcccccagtccttgcctgatgaatgaacaaatgctggcatctcctgctgttccttcaccaggcttggaagcagaaggcctggcacttgtcttaactttatgatttcagatcttggacaagaaatgaaacctgagcctttgtgttcctcatgtatcaagacgcctctccttataggagttgctgatgttaagggattcagaagaaccgaagtaaaagtcgcagtgtggggcctggcatgaggtaggtgatcgtttggagtgtttgttaataagagttaaggtactatttctccttctgcagtggcttagaaagtgccactgcccgggggaaggacaagctcagccaggcagcacagagcaggggagggacgcaggcttggggtcctgaagatcctgggtgaaacctgactccgtgtactggctgtgtgaccttgggtaggttgccgaacctctctgagctgtgaattctagttaggaagcagagataataattgcactagtcttccagaactgctgcccgtaagagcttggctcggttcctggcacttaccctgtgccatgcctgtgctcccgtgccctctgggaaggcccactggcctctgcctccccatctctgctgcctgctctctcttctaaggggaggccagaaagagggccagagaagccagagataaagccgctggcctggggaatttctcttcatcttcttatctgaggagtttcaaaggctgccagtggctccgcgtgcgtcccctgcttttgtgtcccttgctggggccgtcacatgtgcagggcttctctgcctcagatatactttcttctcccagctgccaagcccatgcagttcacagacaccacagctctgccacaaggacctcagcatggcatgggggctggggacccagcctggggccggccagatgcccacctggctctcctgggcctcccctgcacacatctgctcttctccacatgggccaggggtgggactcggcctcagctggtctcacaccctcacgcttgcctctcggaagggggtcctgccttcatggcccccggggcagaagaatgacacacagtgatgtggggcagggacagaaggagcccaatgggaaaccatgtgtgcctttgcagagagggcagcacactcaggtccaacagtgctcccagatctgccgctcactctctggataatcccaggcaagtttctgaccctctctgaacttcaggttcttcatttgcagaatgaaggtaatgagattcacctgttgtgagatgacggcagtaaaggacttggcacccatgagcctccataaacattaatccgtgcatgcccaattatgcatgggaatctgtgtgtgtgtgtgtgtgtgtgtgtgtgtgtgtgtgtgtgtgtgtgtgtgtttgagtgatcgccttgctcatcttttcttttttcttctattcgattttaagtgtgagaataattatgccagaaggtgttaccaaggtgggacaaaatcatctggttgatgacgttgccagggcacagacccaaggatgagtggcagggtccatccttcatccatcctccctccattctcctccatcctccgtccatcctccctccattctcctccatcctccatccatcctccctccactctcctccattctctgtccatcctccctccattctcctccatcctccatccatcctccctccatctcctccatcctccctcccttctccaccatcctccgtccatcctccttccatctcctccatccttctccatcctccttccatctcctccatccttctccatcctcctccatcctccctccatctcctccatcctccctccattctcctccatccttctccatcctccctccattctcctccatcctttgtccatcctccttccattatccatcatcctccatccatcctccctccatctcctccatcctccatccatcctccctccattatcctccatcctttgtccatcttccttctgttctccttcatcctccatccatcccccctcagttctccttcatccttctccatcctccctctgttctcctccatcctctgtccatcctccttctatctcctccatcctctctccatcttccctctattctcctccatccctcctcactccatctcctccatccatcctccctccattctcctccatcctccttccgtctcctccatcctctgtccatcctccctccattctcctccatcctccatccatccttcctctagcctctgtccatcctccctccgttctcctccatcctctttccatcctccctcagttctccatcctctgtctatcctccctccattctcctccatcctccatccatcctccctccatctcctccatcctccatccatcctccctctgtcctcctccatctccatcccctgtcctgtcatttctccagccaggggggttgtctccagccatgctgcccttgctgatgaagtggatgtaaacttaagctgaaaggattcaacctgggagatggctcctggagaagagggagctgagagcggtcagatgagagaggctccagcactaacactagagggcctgacctctagggcttttatgtgagttgcacacacaccttcctgctgtactcagacaggctcgtgactaactgttaacctgcacacaaggctgtgtgggaatcatacacacacaaacacatacatgcatgtgcatgcacacacacacacacacatattttagcagacacattagactccatacattagactctgtatatccaaataagttttgtgttcttcctcccccccaccacctgtccccagcacatgccccaggaatcactctgggaagctgcgtgcctgttccaggggagaggcaggccgtggggccagtgtccacaccttgaggagggtctcccatgcagtatcctcctgctcacatgagagaaaggatctcatttctttaaagtcagattttgctttgtttccttgctgtgctcccagctcttagagccacctcatttctcaaactgggaattcaaggctggtttcgaaatggataatgatttgtcaccaacaaagggttctcacagctcttgcctaagaggagttctgcacaggtgtacagagccccaggtggccactcagaggagacaagctacctacacacgtgattttctagggggtttgttatcagatctgttccaggatcttgtcgagacagacaccttgaataatcctaacaggtaccattcatgtcacatcttttgcaccagggtgggcttgacctgtagaatcccaggtattccttacaataattctctgatgcaggcattactgcgcctgattccaagaagtgaaaacaaattcagggtggctaaccacttctgcctaaggtgacagagctagcagggacagggtcatattcatgcaggcctgacttcaacgtctatgctcttttcactctgaccccaatgatggatgtggacccacatatttatgccacaatcacacatactcagaagggtgcacaggcttgcctttgtgtagtgcacatacacacacacacacacacacacacacacacacacaccagacccatttggctacagaacccaagaataaagactttcagagactggacatgaatataaactttcctccctttggaaacataaatttatggcagcacttctaatcttattttctctcaacttgctgagtaaatttagccattttcctgcctgaaaattggatattatcatcttactcagagcctggggtttgtaaaagacagggaagtcctcagtatccagcagtggttggagagccgtgggctatgaagctggacagtctcctatggaatgcacttttcagtatgcatttatttaaaaggtgaacctggaacattttttgagcccaaaacaaggaaatgttcagaatctaatggggatatattcaaaggacccatgctccagcttgaaggagctccactggccaaatttaggttaagatgagtatggaaatgaacaatgtcatgcgtggattaaagcacattgaataaaaaccataatgcatgagtttatactgatgctaaattactttaaagggggtcagaaaggaaagctgtttacaaaagaatgccacctaagtaaaaggaatacaagaaaatctccttatcccaaccaccatagtaataactgattcgggtaagactcttcaatggatactaaaccactgggtgggagagtcgtgggaaggagattattcacatagtcccaagttatccctctatagtccactcatcaataacgaagggaagaagatacttcaaccttttgacaatggagaaatctggtggatatcaccttgaccagttcatcaaacctaacatcaccaataacggggcaaattgtcatcaggcaccttccagtgtgaagcatcaaagacacatacctacaaatatgcttcccaaaaggcttaacatgagtttaatcatgaggatataactggacaaacccacattgagggaaattctgcaaagccggctggactctcagaagtgccaaagccatgaaaggtaggaaagaaacaataaggaatagttctagatttaaggtgtatcaagactcatggcaattaaaggtcacacgtgatccccgattaggtccggcgttgaagaagaacaacaaccatggccatgaaggacactgggataaaggtacgtccatccgaacaaatggagaaacttgaatataggctgctttttagattgcagtattgtatcattgttaaatttcccaactgtgaaaattgtgtcgtgcatggttctgcgggtaaatgccttgctcttaggaaatattatttatgaatgaagtgacatgatgtctacagcaaatccttgaatagttcagcagaaaacgtgcatgtttatacgtgtgtagggagacagtaagagagcacaaatgagcaaaatgttagcaattgtgatggtacatgtatgcaggtgtttacagtactaacgattttactaagatttgaaaaaaatcaaaattaaaagagagaagaaagaagcacctgctatgagccagggacacaggtggcttccatctaaccaccactcttttcccttcttatgttaacaactttcacccttcttccctaccacgtggctgtagtgtgagggctgccaatcctgatgtctcaagccctggagtaggcacatgatgcaggcctggccaatcagggtgctccatgctgttgcccaccacgactggtcagggatggtctgagctgggccaatcagaatccttccctgggactttctaagtgaaacttccagaaaagttctttctactcagaaatcaggcagctatagcttgtgagccctgaacttctcagtgtcactcatgactcatgaagtatgaacccagaggtgggcacagctgagcgacttggaggaaagagggcctggcaatatcaagctcttggtctaagtcctgaggttccaggaactgccaaggttctggaagctctgacttcggttctgtggtgcacttgtggtctcctctgtaaataatgagaaggcaaaaaaggtgtcaggggatatgtaaggccatactttctggacagtcacaaaggacagaggagatggagcagtgcgtgcgtgtgtgtgtgtgtgtgtgtgtgagagagagagagagagagaaagtgtgtgtgtgtgtgtgtgtgtgtgtgtgaaagagagagagagagagagggaaagaaagagagagggaaagagagagagagagagaaattaagaatacatgcattattggctaggcgcggtggctcacgcctgtaattccagcactttgggaggctgagatgggcagatcacgaggtcagcagatcgagaccatcctggctaacacggtgaaaccccgtttctactaaaaaaaaaatacgaaaaattagctgggcatggtgtcgggcgcctgtagtcccagctacttgggaggctgaggcaggagaatggcgtgaaccggggaggcagagcttgctgtgagccgagattgtgccactgcactccagcctgggggacagagcaagactctgtctcaaaaaaaaaaaaaaaaaaaaaaaagaatacatgcattatcaggaaaggttttctaaaagagaaggaatttgagctgggccctgcaggagaaaaaaaagttttcaaaaggggaaatattcccgtggaggggataggacagtttggacaaagtccgagaagagggaatttgcagggaactgtcctgagacccttgatggtctagcgggggtggcaggaggtgagactatgccagcaggagcagatcaggaagagttctaaggcccttctaaggagtgcagaccttgcctcaggggcacagcaagtttttaattgaaggaaaatcctgattggacctgcattcaggcacaccgttgcccccaggccaccagatccaacactcttaggggcgaggaggtaaaggaatgagtttcccaagtgcgcgctcatctatttcccttgaataacttccacccaacatagctataaaatggagtatctgcattctcccgattgctttgttttctagaatttgcagagcagttagccgaaagattgcttaggatacacattaaggaagcaattgcagcaatccttcttcaatgagaggcagtgtggtggatggtaacaaattcccactctgctgtcagacaacttatttttgaagcccaactcaaccatctgactttaggtgatgtctttaacttctctgagcttcagtgtgtttatctgtaaaatggggggaaataactgaaactactcataggattgtgggcaggattaaatgagataatcgcagagggacatcacaatgtctgccatataagaaattctttttcattgtctatgattgctatcatcattgttattgtcatcatcatcatcatcatcctcaatagctggacctcatcatcgtcaatagctggacctcatcatcgtcaatagctggacctcatcatcatcatcatcaatagctggacctcatcatcgtcaatagctggacctcatcatcatcaatagctggacctcatcatcatcatcatcaatagctggacctcatcatcgtcaatagctggacctcatcatcatcatcatcaatagctggacctcatcatcgtcaatagctggacctcatcagcatcaatagctggacctcatcatcgtcaatagctggacctcatcatcatcaatagctggacctcatcatcatcatcatcaccaccaatagctggaccctgtccactccctgaatgcctgcagggacaagggctgactgttttcaaaggcaggccattccacatggtccttccactgagctggaacctgcttctgtgtaccacccgcccttgcatcctagcagtgccagggccccagaagagcagctctgaaccagataaggaaccaactctcctcctcccctcctcctggatcctgcctccggctcccagccggaagaagtcaggggcaggctaggcccggcactacttgcacgtgtggtatgccatcccatgctcttggtcacccacttgagcgtgtccaaagtctaagatgatgcaggggcccttcacagagacggtcacaacttcctgggtgtgccaggtggtggccaggagaggctctggcccccaactgaaaaccacagaaggggctgctcagggagagctttctgatctccttgtgggcttcctggagaaccggaggcccagagtggccagccctgcaggacctcttgcttgctcatccagctctcccctctgcaggaggggagggggtgccctgtcctgggctttcttttgccaatgtggccacactacaccagcccatgcagtccagggttaaggcagaaagactggggtggggagtcactccaaactctggcctccgcactccctaaaggaaaggctggttctccagaaggacagatcaagcaatgataccccctcctcttatttgcatacctgtccctggcagcagatttgtgtcaacatccccagggcaagacaatcttgtttccccaacaaaaccgattatgcacatcaggccctgggattaatcaccagccacagggttggagccaataaaacaggcggaggtgggaggataagagcagaaaggagggagtgcctgccccagtctgtggctgcgaggaaaggctggaggccagggtggcctgggtgaggggctgcttccctgctggcagcagatccacccttgctgagaccctattctctttccctgctcttccttctccccacctggcaatgtcccggcagggaaaggccagtcaggcccaagagctccatggcacgggcacagataggaagtgaagataagctcaagaggccctgagagggccatctctgtgtcccacctgaatttcccatagatagaagatgtcccctccttcactgatcccaggttgctgcagagcccacccctccattggacccaggccccacaacaagagtcccctggagatggcagtgttcgagagagtgagcagggggccacagtcacagccacagccacagctgctgttagtgagtccctgtgcccaacaccacctctgctcctatgcactgtggtacagaccatcctgtccaggcagcgctggcccctggtccacaacccagccatcctctgcagggatcagtagggtggagccatctcaccttggggcagggctgcctttgccactcacttccagaactccaggctctaggagccctgagccccacactgtcacacaaaccccctcctcaccatgccctcttcaaagcagggcagtggtcctggcagccaggaggaagggcggggaggggcagtttacctgtattccagggagaacttggtcagctccctgttgttgtggagccacttgaactccagtggccagctgccctcggccatgcatgtaagcaccaggcggtttccttccaagtgcacctgtgtccgcacaggctctgtcttgaaatacggggacacatcatctgcagaaacagggagacaaagccaccagtgatcacttgctcacctatgtgacctggtgcgtttagtatcctaaggcccttaggcagatggagcaggtgcagccaggtaatttgcccaaggtcccgtggctgggagggacttgaacctgggtcagtctgactccaaggcttggtcttcagcgggagtcaccgacatctgccaaccagagccctgcctccttcctccccagaccacgctgggctattgccctgctgccagcccacactccagcatcttctgtcacttccctctcagcatacacatccactccatccactctgctcatgggttccccctccagggcaggaggcaagaggggcactttctgtggcccagccaaagggaatatcaatgtcacaaggagaatagggaggcagattgacaactgtagggggtaaagggtctcctgagtcctgctccccaaggctgggggaagccctcaaagtgtcaatcacagagtccatccagcagggccccatggccaccagctgcctgtttcttccatcctgggtcctggagccagcctgcctctacctccccgttcactctaggctggccgcctggttgcccagatgatgggtgaagagcagaacagctgcttccccctctctgcagtcacccttatcctctgagctgactcagcctcgcagacctccctgccccgccacggttctctcgacagagaccgtgaatttcgccccagacttcacaagactgctcagctggctgatctggatggaaatggggcctctgcccttctggccagtgtgggagagggtggacatgagtgtacacaagggaactgatggaacaatgggagagacggagggaaggggaggggctctaatccgtcaaggagatacctgcctttttgtggatagggtggggccgggcggcaggagccagcatctggtaacaatatccacaaagatgacagcacctgctctgttccgggctgttctaggggctctaccatatgctcgtctaatcttcacagcaacctcatgactagacaggattacaatctacattttggagaggggacaccaaggcctcgaggggttagaaacctgcccaaggtcacacaactgggcgggaggtgctcagccccacagacagcttcagagctggagcacttgagcccacacctccctccgtgaagccaaaacccgggtgggaggagaggacagatatcagggaagaacctgcagatgcccagagcttgtgccaatgagccttgcatttgacagattcgagggagtgggttctagaaagcaccactcaacagctcacctagtgagcacctactatgtgccacgggcttgaggcagcagccggcggggaggagtccaggcttgccagcccaactccatgcaccttccagtgaccacactgtgcccagaggggtgggatgtaattaaagctgtgcaggctgctgctgtcagggtaggccctgggcaccccgaccttcaggccagtggtggggggtctgtcatctacggacttgtctacgttcactccaccgcttcccagcggcgtgcggtggacaagcgttcctttatctgagtctctatttctctatcagtggacacaggaaaagaaatagctaccttcacgtctaaggatggaaggaaatagtgatggtgaaaatgctggctctgtgcccggcccagagtacatgttctgccaatgttcatttccttcctgaaccctaaagtacggtgtcccctccagggaaggggctccaccaccctcagtgctggctgatgccccaggcccatcttggtcagacagctaactttaccctgtgagcctggaaggtggaaaacaccagacagccttcttttggcttaagaaatggaacaaaccaggctggccatggtggctcatgcctgtaagcccagtgctttgggaggccgaggtgggaggatcgcttgaggccaggagttcaataccagattgggcgacatggtgagaccccctcttcaccaaaaaaaaaaaaaaaaaagaaggaaagttgggaggctgaggcaggtggattgcctgagatcaggagtaacacggtgcctgggcaatatggtgaaatcccatctctacgaaaatacaaaagaaattagctgggcatggtggcaggcacctgttgtcctagctacttgggaggctgaggcaggagaatcgcttaaactcaggaggcggaggttgcagtgagccgagatcgtgccactgcactccagcctgagcaacagagcaagactccatctctacaaaaaaaaaaaaaaaaaaaagaaggaaagaaagaaaaagtaaaagagaaatggaacaaaccaaccgaagaagaggaaggggctagggagggggcagtttgcagctggaagggagtggacccaggtggtagctggctgtggctgggtgcagcgggccttctcctgcaccccaggctggagcataaggaaggcccagagcccaggacccaggtctatcctctcaccatcagatctgcccagtactggacatcctggtctttggtcaggttcagcccttgtttccaggcctcactgggttcaggtagagattcacaacttaacagaagccatcatatacatgtggggcccaagtcagctggccctgctgcacagcacccccaaaccttgcaccccacaggcctgagggctcaatcttattaatatataacctgcggcaggttgggaggcttttccttgaactcccaccctggctgctactaaccctcactgtggggaccaccagaggggcaaacctgagggtggcctcagggtggctcagagggcagctgctgcccagaggctgccttcgactgctccctctacgtctgtctgactgctgatgtttcattttgttttggagacagggtctcggtcggttgcctaggctgcagtgcagtagcataatgttggctcaccgcagcctcgacctctggggcgcaggtgatccctccacctcagcctcctgagtagctgagatcacaggcgtgcaccaccagctaacttttgtatttttagtagagatggggtttcaccatgctggccaggctggtcttgaactcctgacctcaaatgatctgcctgcctcagcctcccaaactgctgggattagacgcctgagccaccatgcccggcttgctaatgtttcaatcatgcatctctccctgctcattcatgcacatctttccattgctcttaacaagcgtcaggtgaacgcagcgtcttaaaaacagttgagaagatgcttctttctgagtgtggacttggaggtgtgactaccactgctggtcccttccaggggcacttgtgcctccagggtcttaggccacctctggccaggtgctagggaggatggagaggctgatgggcacccatttgccaaggaaaaggacccactgcccgccgcccggctggcagcagccagctctgctctcagcttaacaaatgggcacattcttacttcaaaggcgcattcatattctccagcagctttcaagagccctttgaatcgcgcttttaaaaaccctctgttcattgctgtcatcactcgtttgttttaaaacaataacgatccagcccctgggtgattaaatcccttccatgtggggctgactcagagccagaacagtcagaggggctgggcagtgtgtgtatctgcatgcacacatgtgcatatgtgtgagcacacacacacgcgcgagcacgcacacgctctgcgcccagacgccctcgcctctgtaaacctgctcactgggcaatttcctcccaggtccgcgtttgccagttcattcttcaagccctcccgggggtgccagcctgcagcagaatgacttttgcttggatgggttgactccagaggctgctggagataatgactctggggaggaggagagggaaggggaggcctttccctgagagcctgctgggtaccaggccctgggctgggggctccacatccctcgcctcctgtggtcctcacaaggttcctctccccaagctcctgcggtgaagtcaccccctcccgaaagtcaacctgccccctggatacagggatcctgggagggacgccctacctaggactctgagcagtgacagctgattttcctccaggacctgcctcgtctgaaagcaagagatggcagggggctggcagggtgtgtgctgtaggaagaatgacagactgaggggaagaagatgctgctgggataacagaacgtgtggacgtgtctatgtgtgcacgtgtttatgtgtgcaggtgtgtgtgtgtgcaggtgtgtctgcatgtatgtccatgtgtggacattcacatatctgtgaatgtcaatgtgtgtgtcagtgcacatctgtgtgtgcaagcctttgtgttcaagtatgtgtgtctgtggtctgtttctgtgtgcacatatctgtgtgtatgtgtgtgtatttatgtgcagggacagatttctgtgttgtgaatgctcaggagggtagcacaaaccagtgaccttgagaaagttacttaacctctttgtacctcattttccttagctataaattggagatgtgtttgctttgaagattaaatacattaataaatatatagtgcttagaacagagcctggcacgtgctaggaggggtggctattaacactattgatctatataaagatggacagatcagcccagagagaagagctcatatcctgttggcagctgccagtggctcccctcagccttagtactaggatggtgcagtaaacaacctgtgcaactgtacacaacagccctgttagccaccctctctgtggaaaaggagataattgagaaggaaggagaattgtggatagaaagaatcaacgttataaagatgtcattctcttaaacttttcttcacctcaaacacacacacatacacacacacacacacacacacatacacatacgaaggaatttttttaagtaggcaaagtgattctacagttcacatcaaaacaacaaccatgaaagaatagccaaacaaattctgaaaaagtatagcaaacagaggaaactagcatagacatttaactacattacaaagctgcaataatgaaaacagtgccttcttgtaaaatagactgatgaagaaatagtccgggagtctagaaatagacccaaatacatacgaggaaatttaatgtatgatgaaagtagaatttcaaatcagtgggtaatacaccaattagtcaataaatggttttgaaacagctagggaaccatttggggataaaaaaataaagatgaatctctttctggcacttttacctcaaaataaatgctggatggatcaatgttttaaacatgaaaaatgaaattctaaaagacctagaaaaaaaatcagagatttaaaaatatactgtcttggcaaagcaatgtactcgccaagtactttctaagtactatgcaagctccaaaaggtcataaaacagattgataccttcaactacacagaaattctgcctggaaaaaaaaaaaccctcataaacaaaaagaagtgacaaatgacaaactggggaaagatatttgcaactgttatcacgggcaaagagctaattttcctgatatagaaatgttcccacaaatcagtaagaaaaagattaacaaaccaatagaaaaatgggcaaaggatatgaagttcgcagaagagaattacaaatgcccctggaactcacacaaagatgctcagcctcatgataagaaaaaggaaaactaaaattcaataagataccattttttcccttatcacactggccaagatgtaaaagtgtgatattctgggctggtgaatttgtagagcaacaggcaccctcgcagacagctttgcgggactgtagcttggtacgccctctacgagagcaatttggcaatgctatcaaagctaaaaatgcacacatcctccaattcgccaactcttcaaggaattcaccctccacagactcacttgtgcatgtgtgaaatgacagtacttcagagccgctcagcttataacagcaaaagcttggaaatggcctgaatgcctatcaagagggcactgcttaaagaaacgattgtccctccaaacaacagaattctgtgcagcagacggcgcctgagcgatctttgagaactactggtaagtgacaaaaacaagaatagggtggataagctcaggcatggaatagggtggataatctgctactgtttacgtagaagcttttcttcttcaagtataaaaatcaatttgcttgtattggcacaggctttttctagtggctccatgaaaaatggatcccagtgacacttgagggaggtctgggtgcccggggacttgggttgggggactagcttttcactctatacctttgtgtaacattgatattgtggaccacaggtatgaattacttatctatgatcagatatatgtatacatgtgcatacgtgtatgtgagtgtgcatggtaagctgttcacagggtgatcccattgatgacagggaagaggacagaccctctgtgtgtcatttaggcatgtcacgtggctcggaggtcccggaccagcagagcctgagctgcttaaatgaagagcggccttcagaggccagcaagaggcctcagcccggggcttccttgtaatttcccataacaggtcaggggatcgctgactgccatcttcccttgatattcgcactaaatacccccattgtcctccctaggctccaggctaaatggccccatacagaagccaatctcaacttcaacttttccccttctctgcaaaataatgtcatctttctctggagtccccaggctgtgtccatctcactgttcaggggatttgacttcccagccagcccagccctgggaaccgcacctcctgtggagccattctgctgggaatgggtcggtgggtggaggaagggggtgatggcttctgccagccacctaattggccaaatgatgtccatctgccctccagaataagctgcagggagtaccaagcctggacaaactcccttcccagctctgaaacatgcagaaacctctctctttttgcggcttcttctcaggcatagaataagggctcagtcatcacgagcttccctggaatgcttggaaacagggtgggagctgggatttctagactcgcaaacttttctcccaccatctcctagtcttggccccaccaccgtgtcctggactgattaccacggcctcttaatgggtgccaggggtggaaacctgtgctccttacccctggtggaccacacacctgagcaggatggacccggggtcagagggagcaggggctcagggtgggctgctctcaccaaacctcacttctctccaaacttctagtcttgctgctgcctttattccatactaaccatggaactttctatccatgaagcactttacattcatcatcttagttaagaggcctgagttcatctcaaggaaaccactatcattttccccattttaataggagaaaaccaacgctcagaaaggttctgtaactggactctgccacatagacataagccaagatctggcaggttccagagctctggatctttctattattagcataagacttcccaaagctgtctcacccttcataccccaacctgtagcaccaggggtggtgagagggacgggggacattcaaggaggttggtggcctctctcagggaactggttttgactccacaagcaaaggtcacgcagcattcatactccagcctgcgatgtcacagccccagagccagattctgggatgagggcgaaacaggcggcccagctgggaatgagtcctgcgaattagctagaaggataaggaggcagaatatcccagaagagactggtccgcccagggggtgagggtttcaggtggatgagctaagaaagggcagggagagaagcctggaaatggaggtcaaatagcacagaagatgaacgcatgcaggcgtgggggccaagtaaaatgaagcagaggccagagccttaggggcttcttgggaagaaggggctaagctgggggaccccaccctgcagccctgctcccgaggaaccaccttttcaagaatctggcttgaagatcccagtgggagaagataaattgggtttacatcccatttccatgctaactagagtttgaccttatgcaaattcacctcctgggccttacctgtctcatcagtgaaacagatggaaactcctgccccagagcctgcaggaggatcaaatgagctaatgtgggtgaggttggagccacagtgcttgaagcctcagaggtgcccctttctgtcacacaaaccattgggggtgaccacataggaaggagatggggaaagaggggcaggggctgttatgatcattccacctgtttcccgcttctcagaaccattcccctaagaagcccgcagtctcttgaagttcttacgtctgaggcttccaaattcagccccctcaatgccattctaagctggctcaaaaattgggtcttgcctgggatggctcataaggttttgagcagggtcaggactggtagagacagctggagcctggggaggggttgcaaacgcctgcgtggattggtcccacaacattggtcaaacccaggtgggagatggtactggtcagggtgccgagggcccaggaggaggctgctgtggccctgttcggcccctgcccttcagaagaaatgtctgcacgtcatacactagctaggtggggcagggactctctagctgcctgataaaggctgcagggcctggggctcctggcgagtcccttccctctcccagccccatgcctggcaaggcctcttgctcctgcctcaccagccagggccccagagcaccctagccccctccccttggattccctcctcctcccttctcccacaaatgagatgctaatttatgcccctccctgtatcctagcagatgcctggcccagctctggccccggtgctgcctgcatgccaagcgcttcattagccgggaaagaagactcttgccctccttcgtctaatcctcgccagtgaccttcaggaaccaggcaccttctgacgttgggagcctgggatggtgcaatcatcaattacgccgtggcctccgcagctgttcctgaatggatttcttgctcagagaagcgtgtttgaaaagcatctaatggaacggatcatcaatttgtttgaatacacatctaatctgattaggggggcactggccaccagggcagctagtgcaactgagccttgacatggccccagggaatcataagtggggtggcggggccagtctagggaaggagggctgtgtgccctgggcctgccaccgagccctccttgagctcagcccatggtacgtccagccaaaaaagtcacagagaaaagcagaacacatcacacagatgccaggagagctgggcccaagactcctgtttttctatagccctggcactgggcacagagcctgagacaaagaagatgcttgggaaatatgtggcaaatgaatgacagtaaggcccaacatggaagccaagggatgtttaataaagtcatctgtgggacaagactaggtgatgcctgtattgggttgaatatgtctcccccaaattcatgtccttcccaaaacctcagaatgtgacctgatttggaaatcgagtctttggagatgtagtttgttaagatgaggtcacgctggagtaggatgggccttccgtgactggtgtcttggtaggaggagaagaaacacagggaaagagacacacaaggagaagacaagagccaagtaaagacagaggcagggactgaagcgacgcatctaccagccagggaatgccaaggactgctgggagccaccaggcaggcctaggacgggggcaggacggagtctcccgttgagcctgcagaaggagcatgcccctgtcaccctgatttcagacttctggcctccagaactgtgagagaacagatttctgctgtttaaagccacccagcttatagtgctttgtcatggcagcccaggaaactcatgcaatgcctacaggaagctttgtccgtcattccacagaaggcagcatggcagagaaccagaaggaagtccgagccctgcctcgctggatgtagctggtccttcccagacacatcacgtgcgccatgccactctcttccctggggagccctttcttaccttctttaccaggaaaatgttggttttcaatccatgttagttcctgtccagcaccccttcaaagctcaaatgccatgccctctgtaactcttctccagatgtcctcctcagactcctgagatcgcctccctcccagcatgcttggtgattcccatgctacatcccccactgctgggcacactggggctccctcatcttcctagccccagagcctggcaacagcctggcctgcagaagagcccagatccatgagaaagtgggcaagcaaacttgctgtggaccagcgggtccctcccttcttgggagtggaccagaatggagatcacaaagttcccttccagccctgacattataagagccgagtagccctctgggggatgaccttactgggccctgtaatgggaccacctgggttcaaacccagtggactctgccactcacaggctgtgtttccctgggcatcattctgtaactctgctgcacctctcctgaaaaatagggatagcagtgcctacctcgttggcctatggaaaggggtaagtgcttcaaccagtgcctggcacagagaaagagcccttggaaagaaggctgttattattcctcatcttggcttggtgcagcctctgcaagcccttctcatagccggggcctcctgtttgaaccacacaggtaaacagggccaaagcacctccaaccttgcatggaaaaaagacggttctcatttccaataggtttattttgcagttaacagaggggaagggagctctttcttacatttcccttggagggttcagagattaaacttataccatcgattagaatgttttggcctaacggtgctagtatcattttagtgtattcagattcatttgagctataaaagtggcgataataaaatgttcactaagtcctggaattcctcccaagaagcccgatggtgttacatggaccacagtcctcttcccctcagtggccccaaggcaggacagcatgcttggagcaattctccagttttacagctgagacttgagaccccctagaaattgatcaatggcctggccggcctgggtggcttcatgagactcagctctgcctcacctctgtcacccttctcacaggtgactttgtccaccatgcaggtaccactcttctgcccatcccctaagcctggggactctggtgacaaagagacactgtcttcctacaggtctgcaggagcccagagcgaggactcataggcccagggatgcgtccaagaacccacagcctgggggtctccagtgtctacctccttggtcagcgatggtgccaccagatgcagggcacggaaggctgtgccgtgaggaaggaccagcaccccagagctctggctggcatgcttcccaggggcagcccctgttcctcctcttgcccacccttggagacgggccatcacctaagaggagggagagatggaagctgggggaagatgggagctaggggcagtggctctgacttaacaccagcattggtttcccaatattgaataaagagggctgagctggacagcaggtgtccttaggggcttgacctcaccacccccagacggggcctgtctgcccaatttcaggggcttctcctcaatttcctggcttcagggcgaggctgctcagcccagggacaagaaggaaagatgggtatttgttaaaggcctactccacactgagcagcgcatgtttacccatttaatcctcccagcctccttaggggagtgctatgaggacttctcttttatttctctcatctgaagctcagatgagagaggtacccagtcacatgtgtgtcagtggcagagctgggttttgaacccatagccgcctgcctccatgcaaggcctctgacctcccctctgtccaggctgcgtttggagcccaggaacagattccaaggctgggccccgcagggaggaaaaaacaaagcacgagtcgctctctgcacggaggctgagagatggagccaccgctgaggaagaacacacattcatcaggctggtgaccccggtgtaccagcgctttgtggcgtgtaacaaagactgccgagcagaaaattggagttcaatttgccgtccatcctgcacgcagtgctcagcccattctagtccctggcaggcacctctgtgctttatcataaataataacaccacgcggctctatggccctttccgcagttacagtccccgagcaatttacaagccagattatacacagaagcctgcacatgcctgccggccagcacacaccacacacacgcggcctcctccccagtcactcctagggcccacggccatcctggtgtcacccatctggggctgcacccaatctggagggaagcaggccgttgtgcacccctggacactgggctctgctcctgccctggtcaccttctttatcccttttactggctctcatggttggcagagaacccacgaggtctggtggcccactgccccttgctggaccaaggtcaaggccacttcccctctctttctttccgttttagaaggagcttctggacctcctcccctccaatcagcagtggccctttgtctctaccacagggagtcccgtctctcctcagaacttattgggagtagtgggggggtgcaaaagcagcaacagggacccacaagttcaaccgctcgcttcacagacgagacccctggggcccagagaggtgcagcagcttccctgaggactctgcatcagctgctgagctgagaccaaagcccaggaccaccggcacccagtccactacacagcggagccccaaggagggaggtaaacaaaggtctagggcagactgggctgctccctctgagcatctagaaacttccccagaagcagaagcttcaggcagggcctggaggggctccagcagcagctccttccccctcttgccatcaaactaaataagaggtcaactattgtatgatgccatttatatgagatatccagagtaggtagatccatagagatggggctcagattggtgactggcaggtggttgggagagaggggaatggggagtgactgtgagtgggtacaggcttccttctggggtgatgaaagtattctggaactcagtggtggttgtacatcattgtgaatgtactaagtgccactgaattgctcacttgaaaatgattttttttttttttttttttttgagaccgggtctcgctctgctgcccaggcgggagtgtggtggtgcaatcatagctcactgcagccttgaactcccaggctcaagtgatcctccactttagcctctcgagtacctgggaccacaggcgcgtgccaccatgcttggctaatattttgtatttttagtagagatgaggttttgacacgttgcccaggctgatctcgaactcttggactcaagcaatgtacccacctcggcctcccaaagtgctaggattaaggcatgagtcagtcttaaaatggctaattttatgtcatgcaaatcttatccccatcaaaaaaataaaaaaaaataaaaaacatacaatgggtgccaggtgtcgtgtggcctcctacttcccctcctctccctgccagccccatgcagttcttgggaagaagactaaaaagcaactccaggtgctgtgctccttcctgtgctaatccatcatctggctcctgccttcctgcctcccgcccttgccctgcctgtactcaggagcttctcccatgtgtgggctcaggcgctgggtctcctctgggttctggagggtggggatgcatttccaatcactctcaagtttgcaggccatttgcaatgacagaaggccttggttttgctagaggatgggagttgggggcgggggtgagccccaactccacatttacagactgctcgagacagagtcaacacctgttttctgagccacagtctcctggcgcgtaccaggaagtcctgtgacacctcccttgctgggttttgttaggattcaatgccatagaactggagaaaaacccggggacactttgcctggctgagggcttggcacacagagatcataggaaccaggcaggtgccaggcctcgtgctggtgcgtcaagtgtattttcttatttgcaccacacagcaatgctgtggagtcggaactattcacggcctcactttacagaggagggcactgaggcttggagagttgagtgactcccaagattacataatggaagtggaatggaaggtgttgcaggtccacattaaaggtttgtttttttgctccttccacaaggccggtgtcatcaaagaccaacccagagtgtgcaactctgagcgccccggagagagaaggcagggctttgctttggcggagctccagggtgggcggatgggctgccccaaaggcagggaggagagatgctgtgctgacccctgccccaggctgcagccacctctgctgcccacctcatcctggcctggctgctcatgtgcctggtggcaggtggcattcccagacaacagcctggcccacctgcttggggaagcagaggagtctgctgaaggggggcagttggtggtggggagggccaggcggcaggcccccacattccaggggactgtattcattatccttgcctgggaaccagctggggttctctgccgtctctgctcttctgctttgaaaacacatagcccatctgtggtagaggaaaggtggctgaaccaacatctgcaggagaaggtgatggtatgtggactctgctaccgcctcctgatggttatccatccagggaggtcagcagctccccttgcttctctcgctcaatgtcatgtcctcagatttaatcagcaccaccccacccacccccgctcctctctggaggaacctggggccagcagctgataccagggaagaggagagagacagaaacacaaggaaattcatactaatgagagagcagactgggctcaccctgagcatctccatggtgccaaggttcacattcaaatggagtttgtgtctctgtctctggtccccagctcctcttgcgggtgggatgaggcaggaagaggcagctgaggctggacatcagggaaagccctgggctggaggccaggccctgtcccggctgtggctgccacagcttcttagcttctctagtgggaagcatctgtggaactcatctagcccaacctctcttgctggcagatgggaaaaccgacgcagaagagaccaagggagaattggagctagattttgataccaagtcactctgtctcacttgatagctcttagcctcattttttccacctgttaaaatgggcatgaaggtttcacagtcacctgctgtccccttccaagtctaggctctgcaattgggcctttttgaggatgtctggttatgccaggagagcctctcttccccgagagagaccaagcttcccctcttgatgaggggagggctggtgctgtggaatgctcttcatggacttctgctataccccatattaagggctgaattgcactgaagtcctaaccctggatacccgtggttgtgatcttatttattatagaagtggtctttgcagatgtaatcaagttaagatgaggtcatgagaggggactctaatcccacatgactgatgagaaacacgcaaggagaagatggccacgtgaagacaggtgaagatgggaacaatgtagctgccggcatgggaacgccagaatcgctagcagccccagaaaccagaagaggcaaggatgggacttcccttacagactgcagagggagcgtggccttgctgggcactttgatttcagcctactggcctccagaactgcgcgacaagaaatttctgttgtttgcagccacccagttgaggtactttcttatagcagcaaatggaaccaccccctcacctgcaccccccaaataacaggccagcactgcgcagagcccctttctctatgcaggtttcccagatgctgccccagcagaagcgagccccctcttgtatgctcacatgtccatcacgacagccctaaacttctgagagccttactggacctggtacatcttggtcatttctgtaccttcagtccttaatctggtgtcttccacagaataggacctcagtggacattgagcaagggaatgaatgaaagggattttctcatttccaggctctgtgatcatcccttacctgcccctgcatccctctgacctatcgcttctcattcctactggctacttctccatgcttgggcctccatttgccctccctggccccagaatcatgtcatgacagctgctctgcagttgggcctgagctcagctaatggtgactgacgacattctgtgtagcagggaccctcgggcagcaggattggcatgttggcaggaggcacagtgtgattgatagcctacgtgttgataggtcctttccaaccccttccccagaggctggagctttctggcaaggagaccaacatggcccccgcccgccccggccattcacccttctttttctgttgcctcccctctttcccagaactaaaattcctgcccttcccctggtgggctggggatgaaggtggatgggatgtttagtattcttgggctcaggcagagaatgaggggctccttgtattcccctttttcctgccaggacacccacatccagacagagtgatgtgagagtcacacacctactgtgccctcttccctctagcatgactggagcagggggcctccttcccaggacccctgtctgcagtcatgagggccaggcacctctgtgctctctgtgtgtgatccctgagcccaggtagcacgactgtcccattgcatagatgagaacactgatgctcaaagacatgaagtgacttcacccaggttacacacatggtcagtgtagaccctgggattggaatgccaagctgtctatctccaaagcccacgctccttccactacaatgcatgaagcggtttggaaaggcaacagagccatcgctgggtgcttcctcctcaatcatgcagacgtttcaggcaggagcaagggttccatctcgcctctgcgcacatcattcccatggacttgggctgcctgggaaaggccaaaccatcacatgcatcccatgggtgaggccgtggatggctgtccaagactcaccttcctaggcctgtgtggccctgggcagccaggctacttctttgggcctcattccctttagggcatgatgaggctcgtctctgcccacccctccccagggcaccaaggagtaagcgagagctggcctttgaggcaagaagcccggagaaccatgggtcttgtccccagctgtgtgagatccaagacaggctctccatggggaactgacacagggagagggagggccccagaagcagccctcgagggggtgaacgccaggagggtcctaggagatctttgctcactctagccaggccaggggcacagcaggcaggagggcaggccggtagctagggtttggcaatggacaaagccagcaagggaaagggagagtttacaggaaggcgacaagttaccggaaaggacaataaattaatataatagggtgcttggctggtgacagggaataaaacacgtggtccaaaaaagccccatgtgagattgtcaataggatgaatgagaagggaagagggaaatgggggaaagaatgggaaccggaggctcactgagcagcctgtgggaggcggcgaggtggctctcctcactgcaccaccacctcctctgcctcttctcagatcaatgctggcatcagaaccttctctccaaacggccccgcaggatcccatccctatcctagaagtaattccctcccttttgcactggctcccccatccctgcctacccaagaaggctcccccctaccttgccccctagatttcggtgcccttgactcccatcccatgcaaatgccctcagctcttagccataatgcagaatatgcatttcaaccattcattctttcactcaaaggtcaattcattcattcagcaaatgctttttgagcacgtactacgtgccacaaaatgtcagagtgagcaagaaggaaatctctgccttaaggagctcccaggctcacaggggagatggatgagccacttggcagtgggacaagtgcgcgacagagtgaagcccttgatacatctggctgctgcggaggcacagcttacaggaccgtaatggccctggggaaggtgtctccaatgagcatcctaaatggcacaagccaggtggggcagtcgggaacactcacaggcagacggtgtcatttgtgaaaagccaggatgcgtgcaaggaacggtggcttctgggaactttagctatttcagcatgatggggctggagggtgcagggttgggggctgcaaggttgggggagatgtggccggccagcacaggggccgcaagagcaggcctgggtgagatgaactctgattcaagccctggctttgccaattaggacctgcatgaccttgggccagtcaggtaacttctttgatctggttcctctttgaggagaaagaagggggtgggaataatgtattaatatctgctttggaggagaaaatgcagacgtatctctcagcttggcttctgggctttcaatgaatcaatgaatgaatgaatggtgacgatcagagtcctaggcttataaattatgcctaggtgcttggatgtcatctgtgggtggtggcgaggcactggagattttgagcgtgtgtgtgtgtacataggtgtgtgtgtgcatgtgtatgtgtgcatatgtgtgtgtttgcatatgtgtgtgtttgtgtgcatatgtgtgtatttgtgtcctgagggcttgtttgggtggcaggatcagcccaaggccccacaaacccacttatgtctccatctccagcctttcttagaggacagttacgtgcagtgtgaggaaagatgaagctgaggatggtcctgaataatctttgatgagcatgcaataaaggaccctcaattcctcaacacagaggatctcaaagtcatgacttgtcttgttgacctttcctgatcagtgaacaccagttataggccctggcaacacaaagaggtgtagacatggccctgcctggaggccttcacaagctggcctgagagataggattcacactgtgagggatgactaacggtgtgaggcatcaccgggcatgggctcactgcggatacaggagctaggcggatgggcacttggggaagagtggggccactgaggattggcggggcagtcaggggagctccagggaggaaggggaccctgtgagtcatttgttcacggatcaatccaatggcattggactgtcactctgcacagggggaggggagcaggatgatgcagtcttggagctcatggagcttagcatctaccaagaaatgcaacgtgaagcagggactgcaagagtgggggaaggggtgtggatggtgtgcagatgacagtgggaatgcataatgcaaaggagaaacctctcaaaaaggtcacccttatggcagacagaagccaggcagagggaacagcagggtagggagtttggagggaaagacagcctggcccattcacatctggctcagaactggagggggactcctatggttggagtcctaatggcaagaagaggaaaggaagagggaacaggagaagaatgcacagggcctgcactggcctcattagtgagccacatccaggctccagggctctatcctaatgccgataagaaggccctgaagtgacattgccagcctggcagttttctgcacccctcctggcagtgcagaggagcgtggatggaaggaggtaggtgtgccggctgagagtctagtttggaggctgctgctgtaagactccagggcagagacgatctcccagggagaaatacctcctttggtggacttcgttttcttttccatcctatgtggaaactgttccctgtccagaagaaaaatgatgctgaggggagaggaggtggctttttcgctaggattctggtgctgacgatgggggtggtgagaagaatggggattgtggagctgttttggaggtggaaccaagaagacctgtgttagattggagggcgggggttgtctgagggagagggaagcgtcagcagtgagggcgaggtgaccgagatggaaacaccgcagctggtttggagagaagatgccaggtccagttttgggcatgttgtggccagctggttatccaggtggaacgttcaggtgctagccagtcctggaccccagaggaggggtgtggagccatcagttagcaaatataggggaactggagctgcacacctttcaaaattcccagagagacaggggagagtgaagaggtagggagcccggcagtctttgctgagtacatctccaaagtctccccggcttcttttcccatcctgggttcctcagccccattcctagtctgtgcaggtgcagtgaaagaagtaacacgtatgaagagcttgcaatgtgccaggttgtcccaggcgatgcaccaagtccacatgacaatcctccaaggtcactaccacttctctaatagatggggaagcagcgatgcagtgaggctgaggatctgcccaaggtcacttgggagcgagcagtggagggattcacacttggggccggtcaagtccttggctcctgctctcatcccaaggcgacctactgcctcactaagccccaggtgaacagcgagggctgcttgctctctgttctccactgtgatcccctaagccaggggctgaggccttccactcctccatctctctcctgctctctgttgactctttgacactgcagggtcaccatccagtacagcagatcaatctctctacggctcatctgctcccactgcatttatcccctgatggtcgaagcttttatttcccggtgagaggagcgtcccctggccatccccaggcacagataacttacggaccaatcaatacagccattaccctttggaccatggcaccgacacaggtgcaaggagccaggggagcaggcctcgcccctgcacctctgccatccttgaggtccctgagctctgcccagcttctgcagctccttctggtggctctcacaaggtcttctcattgttgccccctcttctgtctttcttgagtcctcttacaccattttgtctacctgagccttctgtaaatacctcctttaggggcttagctttcttttctgtcatatggggaaactatttccttgtccagaagaaagatgattctgggaagagaggaggtggtttcgtctgtaatgagcgaaaagcatgcatgagtgggaaccggggagtcctacagtcagtaccgaggttggggacagctgagggaggaccaggctggaaaacagagatttcactcgggtctgcctccaccactggaggctgggagactttggaaaggccaccttagccctctgtgcctcaattttctcatctgaaatggagctagcaccgtcaatatgaagagtggaatgattattaaacaaggcaggctaggattattaacaaggctgccttgttaataaaccataggcaaattaggtcagggcactgggtggagtagcgttccccaaaattcatttccacttggaacctcagaatgggaccttaatttggaaatagagaccttgcaggtgtaattcttcctgttaagatgaggccatactggatcagaatgagccttgaatccaatgactagtgcccttacaagaagaccaggtgaagccacagagacacacggggaagatgaccatgggaagacaaaggcagagattgcagcaatatatccacaagtcaaagagcaccaagggttgccggcaaacaccaaaagctagagacaggcatggaacaggtcctccctcagcacctccagaaggaacccgctgggctgacacctttactttggatttctgtgccccaaaactctgagatgatatatttttgttacttgagccacccagtttgtggtatttgttatggcagccacaggaaacacatagagttgttaacacggtagtgggagagatgtccttaatgcaggacccattcctgctgcccagtggggttaagtgaaattctctatggacatgggcaaggtggaaggaagggggcaaaactacccttccacatcttgcattccagtcgaacccatacctgaagaatgggacagctagcttctttatgctttgctctagcttcttgtctcctctctggcaactgtttatgacagtcccctcctgcattagtccattttcacactgctataaagatactgcctgagactgggtaatttataaagtgaagaggtttaattgactcacagttctgcatggctggggaggccgagggaaacttacaatcatggcagaaggcgaaggggaagcaaggcacgtcttacatggtagcaggagagagagagagtgcaggggaaactaccaaacacttataaaatcatccatcagctctcatgagaactccctcactatcatgagaacagcatgggggaaaccgtccccatgatccaatcacctcccacaaagtccctccctcgacacctggggattacaatttgagatgagatttcagtggagacacagagccaaaccatatcacctccctaggatccacagaacaccctatatacaaggaccctatatacaatggtaggggctgtaagcccctcgcaggggtgtagcttgtactgctggttgggtgggagcaatgatgtccaaatggcactaccacatgcatccctttcacctggtcttacagtctcaattacccctggcattctccaaccttctccccatgatggccttaacaaatgtcacggcaccatgttaattttcagaagggaatcattttgagcatctattagtgagaacaaccatgccccttgtggccccagtagagcatctagctacaaacccataggaaaaggggaccccgtctgtgttctctgacaaggggcataagactctccctaatcaccagccctagggaggcttgagggatctctctggggtgtctgaatatgccagtcactcacttcctgactctgtaaccctggtttccaccaccttctcctagtcctcctccttttcccgcctttccttccctgccttcctcctgtggttctgaaatgttgatgtttccagctttctgctccgatcttccttgttcccaccctcatcccttggaaagtacagctgcttttcttttctgcttttagctatggcctggatgtgaatgcctcccagatctttaaccctgatttcttgcctgaataagtcaactgtattttgatgacctccaacatgctcaaaagtttaaaatatccacagctgagctctggtctctgcaagcttgtagaggtaccgtaattttctaatatacttagcggtcttgtttgtacagtcatccaatccagaaataacagtgccatccttggattcttctctgcccttcccccacctctgaccacccactcacccccaggccctgtgagcccagctgcctgttccagctctggtgcataacacggcgtctggtccaccgttggcattcaataaatattttctgaactaacaaattagtcctgctgggttcacctgctaagtattccttaaactggcaagccacccctgccccatctctgatctagattccatctgccaggcccttatcgcctcccagccgccagtcattagcccaatctacttaattaaaggtatttctaaccatgtgcttcctgttcaaattccttcaatggcactccattgcatacaggataaaatactcctcaatggggaacacatagctctttttgtcactgaaccagagacatggtggaaattctggaaatactgactccatggaagggcttaacaacttgtggtttcctcacaaaccacacaccctttcccccaggccttcactcctgtcaatccactgcctgatgcctgcggcctgtgcccacccaccagcttctcctggacactgccagtctagccctagagtggctgaggtgcctgtacctatcggcgccttctaatctccatcgtggtgcattacaatgatctctatgcattcgtctctctctagagaccagatgttctcaagggggggtcattctgtactcctgcccccagctcccgggggacccctggcgatgtccggagatgtttttggtcgtcacaactggagggagggggatgttattagtgtctagtgggtagaggccaggctaaatgtcctacaatggacaggacagcccccccacccacccccaaccaagaacgatccagcacggaatgtcaactgtgctgaggctgagaaactctgggctagacaggagcaagttccctgtctgtccattcccacctccagggccttgccttgaccctgccacgcagtaggcccgcatcgtgtgtctgctgagtgaacatccccacactccaccccaggcctagagtgaaattggatcacttcttctgcaaacaggaggcctgggctgcgaagaaaaggtgccagctgcctcccaggccccagagtcaggtggcaggggaggaggctaaggagagtactgtccttcagagagagccacttcctccaggagccagggcggatgcaaccaatttagctaacaagttgtcagggctgtgatgacgttgccagacaatgaaatcgcccttcttatcaacatggactgccagactgatgagacaaacaagcctgttaattaggcctgtaatggcagctgcaaagggtacaacatttccaaggaaacgggggggctggaggctctctcttgtcccaccagaggtggggcatgcagcggggcttagttgcatcccagacaggaaggaaggctcatctcaccgtggccatggccccacgaggcctgggcctgaaagggtggttagtgtgtctgtcttcagtcacaggcttcccaggggcagggcacagcgcagttaactctattgtggccctcggcacagcggtttacccagacaggcacttaataaaggcatttaataaagatgagtataaacatcaaagggcccctctcccctttcaggatccatctttctctctcttcctctccagccgttccttggatgcccatcttgctcctgcctttctcagagtctctctgtccagccctctgtgtaaccctcatgcccctacgggacgcaggcagtgcagcgctccatcaagcaaggcccagagaggtcccctcatcggtatccccttcggctggtatgtgttggcgggatgtgccagtcactgcctcctgaccccattcctcagcatccctggtcccgcagccaaggacacaggtgggcgtgcagccaggccacactctggggccccggggccgactggcacggtggcttggcctggattcagaggcaggctgccgagcctggaggaatgacatcctcagagctggcgggcacatcccctggcagtctgtctggtcattgggcagtggccagccacacaggtttgtgtcccagcaagagtgcaaacagtctgggacaccccacgtccctggacacaggccctgaggccctctaggggaaacgcctagctccagatcatcactactgcccaccatcacttccctggcacagggaggtcctctccacctccaagactcaggttccaaaacgctctgtgctgccacttggaccacactcagctacagatgggccagcaaggctcccagaaagggccctcccccagccccccacccccccacccccccagacaaattggggaacccacttgggcatcaccagcacctttcttgcagctctctctgtcttcgccaggttccctgtcaccagcaggccccttcagcctgccctccagctccttcaaggaagtgtctctttgagactctgcccccaaagaagggtcattattgctaatgccttttctcccccatctgttgtgattgtttacactccacttgctaattagagactaattagctggtgctgaaattcatcactttccaaacacaatgcggcagcaggaaaagcacagtgatgcggcaacatctgcacctccgcttgcagccaagacgccattctgctccgcctgctccctgctcctcctcctcctcctccttccccgcctcctcccctcctcttcctcctcctccttcccactctccttccaataagcccctagaaggcctggggatgtctgcacttttattcagcaaccacgggacaatgcagtgcaatggctggtaggagagactcagtacatccttgctgaaggaatgaatgcatgtgtaatgaacgaatgaggatcaaaaagcagatgcaagagcgggtccgctgctgggggaaggggagtggcattaaatagctggcggcagggagacacagctgtccatgattctgaggaaggtggcactgggcaaggcagggaccaggaaaaaagcattcctgggacagaggcagtgctaaagagacgattgccgacagatgcctgacctctgagaggcctgggggctatgtgggggaaggttcagggacagtgtgggggctgggagaaaagacagacaggagggaggaggaaggagaagtaaagtcacaaaagggagggatgggaagatgcacagaggcagagcgcgagaccagcaaggcagcagggaaggccggtggaggggaggcagaggtcttggagtgttggtgctggctggctctggtgaggaggtgtgactgcatcctagaggtctctgcagcctgggattgaaaccatccatttgcctgacagctgagagtggagtaggcctaggccctgacctttcttcctctcatctaggggaaagcggcttctattacctaaactccccttcttctcagtaggctgggggcagcgggccgggctccctggactcctttgcatcttctaggcctccttgtggggatactggatactctgcgatcggccgatcagcccgctactgggtctaaggaacccaggaggagggaggcagcctgaaactccaaggggcaggtggggtctctagcccaggccttggtgcacagtttgagaaggagcccccaggacatcctggaatctggaggagaaagagtggaacctcttccctgcccatctcatagtgacatcccagaagacaccgccaatcccctatagccctgaccaggaaaccaaaggtggcctcgacgccaagcctcatccatgtgtgaggacagcagggggctgccctctcttgtgaataggctgcgtacatttcccatcccaccttccttgagagcaggactatgggagtcacagccactcaggttgcagtccccactctgccactttgtgctgtgtggcttagaaggcgctgcataacttctctgagctcatctgtcaaatggggatctccaccctccctcctggtgtcgctgacaggaaaaatgacatgatgccttcatcttaagcatggtgcctggtactggtgtgcatctgctgggtgaatggcggggtggggcattctgcagtccggctgcctcctggggaacatagactgtttccttcttcgcctgtcttgcttcacatgcaacacgtgtgtgcttatatgtgtgctggtgaacacttaacatcctgttccccaggaaatataaaaaagccctgattgcccaccattgccaatttccctggtgtaaatgctctagctgtggctgatttgaagctatcagtgggacatcatgggctacggattgggaagagaggcacacagtgagcaccggctctggcacaccattgcctgccatcaccaaagtagggtgtggagcagaaatctctctatccatggatgtggctggcagggggctgattaggaacctgggtgaggtcagttgagttcctgccacacaaagctgcttggaccagagtgatcattgttcatgtggggagaaggcagggggcggctgggggtgatgcatgccctccataaggaccacgcccacccaccaagcacatcctttcttcctaattcctctgtttcctccacgcccactctgacacttttccttttctgatttcacacatcttagaaactcttagctggttccacgtgctttgcctacactagcaagcaaatcccaatttccccgccctgcagttcatggacgagaccacacctgggctatatcagcatcacccagagggcttgttagaccacagaggtgcagggccccactcacagcctttaatatagcaggtctgggtgggcctgagatttgcatttctagcaagttctcaggtgatgctgctgccctagaggccatcctttaagaacccctggacctggatcagcaagcaggtcactgggatccagacagctgcaggctgtgctgttgtggaaggtttggtgttgggagttcagaggctcttttccagccccagaaaagcctacgacttacttccttgttggcattccaccccaacccctctccagcctccttccgaggcttccgctgacccctgcacctctctgccatctacaccctccaaacccccaggctgggccacctgggcacctcccacctctctttgtaccagggctaggtgtgccgaagccttttcaggcaaggggagagctgaccaggggggccacacagagacagctggggctgctggctattgtcctagaggcagcagaacacgctgcccccacgccagtgcgggggtcgcaaaatcactcgttgctttccttctccaaggttccatgtgcaagcaatgcacaactagtttctgcctcacatcccctggccatgctgggggcaggtgacaagggtccactgggggcctctctgaagttggggggctataaaagtggttccagagggtgaaggagactgtagccccgcctccttccctactccgccttcctgctgatagtctaatctcggcctcctgagtaactaatccccctaatgggatcaacatctctgtccctgcactttacttacataatgggtcagggaggccttcctctaaccaggttggaggaccgctgggtggaggggcaggagtgagatctggggtgcaggagcattagctcaccctgaggctttggggactgtgaggatggatcgtagcatggtgctggttggaggtggcggctcaggatcacgacgcatgtgcgtgcgtgcgtgtgcgggcgcgcatcatgtgtgactgggcgctcagttaatactcagccgcagatattaatccctttctatgcaaagagacgatggattgtgagccctgagaaatcaaagttgaaactcagccaacctcctgccctgctcgccttgcccctgccaaatggccgcgtctgttaacgagggagataaacggagaggccatcaaagcagatttccaatctgccgatttcgctttggggccttcagaactcggtggctcacctcccccttctgccccgactccagcctcctctgccttcgattcccactttgttccccagcccccatgcttttatctcccaaagttggatctattgacccagctcataagggctcctttcatcgggctccagagctgctgatggagaggcaggcagagggtggaagggatggagaagtgggttctgcagcctggagggtgggggctggggagagggggaggtttggggggatgaagaggttgccaaagcagaccgaagcctgtgtgggtggggacgtgcccagcctgggatgtaggaggaggcagaaaccaactcagggagggagaattgcctgtaagcagggggaaggaaggcccttctcaatgtgccaatctgatggtgcatctcccggctgcatagactcagattccccacttcaaattcactttgctcttctattgtcttgccaggaagcagcctgaacccattcttatgagtgaaaataaaaaatgacaccgcgggaaaaataacaaaacagtttctccattcacaaaccccccaaaggctgaaagaaaagaggatgaagagggtggaggggtcacctgtgcactgacctgacctggaacacagtacccactgatcccttcaaggatgggtggttttatttccattctgcagatggtagagtgtggataggtaacttacagctggtacctgggagacagacttctgactcccgggaacggcggtgttcactgcacttggcctggctggaaaggctcagtgaatatttgtagtaatagcacagactcagaagccagacagactgacctccagtaggtgccacggttgtgctgattttatagacagggaaactgaggcacagataggtcaagcagctttccaaagccacccagataaaaatcagctgaccagtctcctggctcctgagtctgtactccagcggctccaccaggcctctgatttcttctttgtttggactccccttaccagctttccctggcctccacccatctctctgtctccttttaaatggatcatttagggtcttctgccagaaacccaccatgtgatgctggggcctcggagccctaacccagccaggactccggctttaaaatgtgcaagcatagctctttcaataaatacaaaaataagtaaattaaatgtgcacaggtgacatttgaaaagatgaatggatgagcaaaccacctcctggcctccgaatgaacagagtcaaacaacttctcgcccacgcctagcccacactggggattcggggagggaagctctggagaaacatcatgattcctctggaagcacccacctctaccacatcagggtagaggagaggaagaggacagaaaatcacataagcaggcacccagtgtatgccacagccatttcgtctcagcctgaagaggctaggagtcccaccttggcctcagtgtcagcactttctagatggggcaccgaccagttagaagcagagtgggcctagaagccaggcctctggactcccttgccttgggcctaggaggtcaccccattgctgctctaaccttcagggcacttagtttctgaaccaccagctgtccttctgatctcctttgtagaccctgggagcattctgtagaacatagtgagcctccctctaagaggaagggggcaggtgacctcaggagaaggctggagaaaggacaggtggagtggccttatcatgctgccctgcctcagttccttagaagtccccatccccaaagagaagaggaaccaggctatgtcccacaccccaaatctcccaaggaactaaggagaagctttggagatgtttccttgtcgcttgaaatgtgtttggccatcactcactggacaggctgagcaggccccttaaagtgaaaaaacaaccattaacggggacagccagaaatcattcgtctgtcatcaaagggaagtgaagtctgtgagggagacagcctgggagcgccggggcagggtcagcgggaagggagagattaaacacccagctgtacatcagccctgctcggctcagcacagccaggagtgggcagaggccagcaggagagggagggccagatggggacgctgatggggagaggagagagggagctggggggtggtggggggcaaaagcacggctagggttcaggtccaaggaccctttggtgaaagcaagtgacacagcaccggagtcacatatgaagcattttgcttgggtggcagcaagagctttgttatgggtaaaattgagtcccaccagaagatacagtgaagccctcagtcctgggacctgtgaatgtgaccttctttgaaaatatagtctttgcagaggtaatcaagttaagatgaggtcacaaaggtggcccctaatacaatttaactgatgtcctgagaagaagagagaacgtgggcagagacacacggggggaatgccatgtgatgacagaggcggagatggagtcatgcggctgtgagctggggtacccaggatgggcggcccccaccagagacggggtcatgcagctgtgggccacggtacccaggatgggcagcccccaccagagacggggtcatgcagctgtgagccacggtacccaggatgggcagcccccaccagagacggggtcatgcagctgtgagccacggtacccaggatgggcagcccccaacagagacggggtcatgcagctgtgagccacggtacccaggaggagcagcccccaccagagacggggtcatgcagctgtgaaccacggtacccaggatgggctgtccccactggaagctggaagaggtggggaacgattctgctcagagcctccgagggagcagggccctgctgaggtcatatgtcccatcctcagcatggcaatagagtctatttcggtggttctaagccactcagcatgtgactttgttactgcaaatcccaggagtgaattccatccctgactttattctccaataacactggaactttacacacacacacagtccccaatatactaaacatatttctttgtgtctaacgtcaatgcttcttgctgtcgcaatgagactactttagcttcagcagggtctctcatcaccgctgtgattctcctaacagaatatgggactaggtatgatatttgctattaaacccataacataatatatatataatatacccattttataactgaggataatgtttatttatttattgctcccacttaagcaaaacacttcgtgcgtgaccctggtgctatgtcacttgctttcaccaaaaggtccttgggcctcttcccatttgataaatgaggaaactgaggctagctaggaggggtaactgggaggacaaccatcaattggtaggagagtctcacatttgggcacccatgccagtgacctgtcttctgcctctcccctcgtgggctgtggttaatctacccctaagtcaggccctacccggaaggcaggtgagcacttgacaggagataagtgggtggtccagagtcttccctggggcaggagctggggctaagcctgcagaacctctgccctagccagagatagaggtgctgagttgtggctacaccgtacaccccagcctcccctacagcactttcctggcaaatgtggtctcggccatcaagctgccaatggtaagctgctaggccccctgagagtaggtgtctgccagtgtctgcccagcccctaacatggggcacccctcccgctactcctggccaaagtggtatgagcaccctcagagcagctgtgaggacagctctggctggggagaggcagctgggccccagagggctggggcagcagtgaagggaggtgcccggggggctgcaggggatgggctgcagtgtgtggaaagagctgcctgccaggagctctccacccttctaaaaggtggaccagggccagagccaggctctccctgctggtggagcggatgtggggcatggctaatccccaagctgcagatgacatcagaaggaccaaggctagctcgggcagcacacttagcacatgggcgccttgctgggtgctccatcccatcccctctcaacatcctcacctctatcttagcagggcaataccgcaccacccccatttcacagacaaggaccccgagataggtagaggggtgagtgcccgtggtctacttcatggcgacttcaaggccagagctcgccccaccctccctccgtctctccctgctggctcttcatttctcgtggcgtgtttaccttcctgattttgcctgcttttgtttggtttgatatgaaaatgagtttgcccagaatgcacagcggcagaaggaagggggcgcggggcggagtcacgctgagtgacaggaatgtgcagacgttgaattaaaagcagcttggcacaaacagaatccggctacggaaaattcaaaatgtatttagagccgagtggaagatcctcgtcaatcgggctcatggtttggtggaaaccacctaggctgggatgcaagtccaggcctgttcttgcctgtgtgccctgaggagagccccaaacctctctgagcctgcctcttctgctgataaacagtgtcaatggcatctcttttacaggagtgtcgcgacaaggattaaataaaacagcatctgtgaagtgcgtgttgccaactgccaagtgtcatacaatggtgaggttgtatttttggattgtctgcttccagggatgtctaaagtacctgggactggcccatctcatcacagtgcaggcagtgcgctggccccaagtccctctctgggggctgtgcctctctgtctgaccctccacgcttcccatccctggtgccttctgaggtgggttcccagggaccagcatggctgggagaacaaaactgaggttgtgacttgcctgacagcagcaggggcagcttctggtggggatggctgctcctgtgatggagggggtgctacaagagagagcaggggtcctcccatctgtacgtgcctggagcgaccctggcttggcctcctgggtgcctgttggtggagggggctggtgaaacagctcagcaggaatgagggaaacctgccacaagcgaactccagccagggcctggtggtgagcagcacagggctctcaatgagcagccgggcctggtaagcagcacagtggccctccgtgagctgtgccctgctgggcaggctgggcctccgtcccctcaacgaggaggggtggaggcagggcaggattatgaggcagcaaggggagagggaggacccaggggaagggccagccacggagaggcagtagtggaggggtcttgggattcggggcctctagcagggccaggctgggaaccgaggacacttggtctccctccctgggcctgcaacaggcctgaaattcatgccatttggtggccctctttaagaacacaaaatatcaaatataaaattaggtgccaaagtccggaaagggcaggagattcccggaaatgactgcagtcccacaagcacccagaagtgaggacattcataagacaccctcccctaggccctggagagcgagactcggatctggggagattggtgtgagtcctgggatgggggccacacaagttctaggccacgccccctctgcagcataggcaggtcccctccagggcgcagtttcctcatctgcaaaagaggggatgggagaggggaatctgaaggtctttcccagctgtcatttgttcattgcttctgggattttatgaatagggatgagtgaccggcagccttccatttactgggggcactcagctccctgccctctcatccaggatgtgaggactccagaagggctggggaggggaggaggaggagaggctggagtgggatggcctgccctccctggggttgaggcagtgatggtgcccgcaccctcgcaggtgtggtgtgtgtggggctgtccttccgatgtcctcaaagaaggcacaccagggcaggtgccatgccgctcatatcccctgggaaaagattccccactctgaggacaggtgtgtggcacagcccatccctattcctccatgtgcagatgcagagtctatgtaagcgacagcccaatgattgcttcctcctcccaccagacagagaaccactcttcagaggaaaatatcaccttccccagactcttccggcaatcgacacaggagttattaacacaagggatgtgggctgggcaagtgcaccttgatgcagatgtggccgtgagtctgagcccaagaagagccactggcccaggttggtgcatgggcactgcccttgggggataggggcaggccagcctcccaccctcttccagagtccagcctgaccagcttccaactaggagaggcacaagggccaggcccgccctccaggaatcccaaggtgcagggggagaggcagcttctgtccctgggtgatgccgctctacaagtgtgaactgagtgcctcctgggtgaggccacccatgggtcccagacactcatcacggggaagaggcagtcactcagagagagatgcaagtgctctgaaactgcaggcagagggacatctaggggacaccaggagagctccacagacaaagtcacccttcagcatggtcttgaagatgagtggaaatgaggtaacgtgagcacagcatgtttgggacacaggagatagtttcacgtggccaaaagtcagggcacctggaggcaaggagatgctaaaggtttatcccataatgacggtcccctgtatgtacaaagaggctttccacatcctttgccttcgagggactcacttaaactcccacaacaaactgtgaagctggcctggccctgtcatcctcaggttgcagcttcagtgacttccttcaggaaaccttcctggactccccagtggatgggctggggtctgccatgttgttctcatagttcctcctcttcacagcatcatcactgccattcccttgcctgtctccccacccgcactgagctccgtgaggacagggacttgcctggcacattgatctttgtgtcaccgtcaaagtctgcaatgggatctggcagaaagaagatactccacttattggatggaggagtggatggatggatggaaagaaggaaagacaaacggacagatgaatagatggataaacagatggatggatgaatatgtgtatgtatgcatgtgtgtatggatggacagaatggatacatggacagatggataatggatggatggatggatagtggatggatggttgagatacctagcagtcccagattcaagtcgcatcatgtcaagaatcacctcagaaagcatctaacttaacctcttcatttcacagggaggaaacagatcatggaggggaaatggcttccatgacacttttgaggggaacaagggagcagcaggggtcagagctcgggtgtgcagcacccatgccaggacctgctgttcatccaggctgctggggcggcaggtccttcaccatcaggagtgaattacagatctcaggtcactgggacctcaaccattccctggacctgtcttctgcagagacaggcctcccaagcacacccccttgtcaaggctctttcttccttgggcctccactccttcttccttgggccccctcctgttgcattttaaagattttcatagtatgtggttttgcctaataaagcattctcattgcgtgcacgtgcacgcacacacacacacacacacacacacacaaagtggaggctcaaggaagaaggccaccttgggggctgtggcctctgtatcttgttggggttcccctcccctggaaatcccttcctttagggagtgaactgcagggagcttgcccctgctggactcgctcaaccccgccctgcttcttccccagctgccgagcctgccgccctgcttctgacccacccctactgtatgtggttcgggtcccatggcaggagggggaccctgtggagagtgattgtgtcgccacctcagtgagactttcttcctaaataaatgaatgcacacacacacgagctacttgagagacaccggtggtaggggttagagatgagggggttgaggggaaatgtgcaagaacaagggaagggagagaaggggtgcgtttgagctaaacatgccctgccgcaagcaggcaaagggaccggaaacagaggagtccccatccccacccaccactgcctggggcctcagaaggcggatcacaaacatcacactgggaggttgggggacagcaccgccatttccagctgctcctccaaccagattaaggccaattaattgaagaccccactgagctggatgatacaaccatcagctactctcaggagggtgacccagcgctgcaaggctgccctgggatgccccgcctgtctgtccaggactggttctggtctcattcttccaccaacctcacagtgtgcctggggcctgggagagggtctctgaggcggctggggtcagttcctcctctgcctctcaggactgggttggatcagacaagttaggaggtggccagggtgtggaacaggtaggctgtagagcaaggaggcttgtgcaacccgggactcagatgaggccaatccctacatagactcagaccccagggctcaaaagatgggactggggaggggctggggaaaagacaccagaaaggcttttcaggaaagtgttgggggaaggagtgctgtcgggggcggggggtgaggagaggcagagagagagatgggaagcctggacccaccccagctgccccctccgcctttctcccctccctgaaggtgccagggcaggcggaggcagagttcagacctgccctctctcctgtgcaggcggatgcaggcggaggaggaaagaatcaattagttcattagctgacacgtctgtgaacatggctcccgggacttgacgggcctggcggccagtggtggtttaataggcacttttgctctgaaatgatacctgggccagcagcttctgccacagcacggggctcgcttaaagaggagggagccgcaggcagggcagagaaagcaggagaatgtggaacagccttggccagagaagggaagggcccccacccccagtcactaggcaggccacactgcagcccagtcaccacacaggccacactgcctcctctctggctgaccagagggagcaaggtgtctgggcaaggtccctctcaggcctgcctggggccatggcctggactgggcagcaggtgtggctcagagacccctggcatggtggtggggagacctcgcttcctgtctctgggtcttggggcccttgtgggtctgtggagtgacctggccaggtgacccataagtccctttcagttctgacatggcaagatctatgatctgttggggaaggtacatttcagaataagcagactgatttttcaaatgcccaaccactcaagttatcagggtcttgagaacaggacggctcagagaggtgcagggatggtacagacaggtgcagagctgggatgcaaactcagattccctggaacccccagtctgcactcttagccacgtccttgtgctgtcctgccgtgacactgggaaagccggacttgactctggagccaggcactgatccaggtgcttccctccctcctctgtatgcatccccctgagtcagggtggttggtcctagcctgccctgcctagggcatctggtctggctttagccaagtctcctcttttggacacagctgcaagtgatatagtcagtgtctcacagagtccacgccctccaggcctaggcatgttgcaaggctctaagccacgccccctctgcagggcaggcaggtctctagggctcaacttcctcatctgcaactcaggggatgggagaggggagcctaaaggtccttccatgctgttattcgtttattgcttctgtgattttatgaatagggatgagtgacctgcagcctttgatttactgaagacacggaggctttgggcttggattgggtaaaaggctctgaagctagaccaaccactgtgcccagggacaggacgaacctctctgtgctgcatgtacgttgccagctcaatagggctggtctgcagcaaggaagccaccgaagggtacagatcgggggatggggacagcggaggctcagcaagtcctgtgtcccattccccacctcccaatagggcctgtctgtaccaccccagatagggtagagacaccatgaagatgttcagaaggtcctcaatggtctccttcaagctcttggtcagaagggagggagggcaaaggaaaaagtctgttttgagcagttcagggggtccggggctgtgctggatgctttttagatttttgatctcatttgatcagatctgctgaagtgttcttaatggctgtgttagtccattctcataatgctataaagaactacctgagactgggtaatttacaaagaaaagaggtttaattgactcacagttccgcaggcttactaggaagcatggctgcgaggcctcaggaaacttacaatcatggcagaaggcaaaggggaagaagcaagcatgtcttaccatggcagagcaggagagagagagatggggaagtgccacacacttttaaatcttcagatcttgtgagaactcactattacgagaacggcgtgatccaatcacctcccaccaggccccccacctttaacacgtggggattacaattccacatgagatttaagtgaggacacagagccaaaccctatcaatggcccaatttacagattgaggaaactgaggttgagaggttaagtcacacgctaatgtcacggggctaggaagtggcagtggtggcattcaatcttgggacacatgccctttctgctgccctgcagcttggagaattctagtgctgcagctgttgggagagagaggattctgtcacccagctggtggtgcgacctgtgcctccagaaaccctcttccctatcccccctgcccccgagtgggtcctcctgtccacacagcatcaaaccctgctttcctgctgctctctaagctccccctgcagcttcctaggcacaggatgattattcctcctggggtgggggacagataatcctgatcccatttgtgggacacagaaaccgatgccaaggtccaactggcacagaagctgggagcactgggcttcctctgcagaccaagcttgctggggttcccagtggcctagcttttgatgcccagagggcagtgtgccctgctcccaggaggccctggatagcctgtctcctccctggggaggaaatgaccttgggcactgcccagtccttgcacactgtctgggggaagtagagggggaggaaatcaggcttctctctcaccaaccaggctctgcatggtggggggccttgggcctgcacacttaagcttgctgctatcccacggagggcagctggaaggtggcttccctggggcccagcccagcctccttctggccccagttactctctcagacaccccaagatgcgtcatccatgccagccgctgaagctgtcagctctctccttctcagcaccactcagagtctcaatgacaaccccggctgcctcctgaagagacacgtcaaggactcctgtccaaatgacgccatcagccttcccgttgttggccgaggtgctgggcaccagcagcccccaccctggccctgttgctggctgataaaggaacaatttccctgcgaaggaaaaacgtagcaagcagcaattttcattcatgagaaagctcttaggcaggcagagaagccggagtgaggagcagggaggagtagaaggagagaggagtgggaagagaggaggcaattgcctcctcctggcagccctccttgattgttgagcagctgccagccacctgggctgctcactgttgaagaaagcttcccatcacttcctcatgactcaaagctctgcaggtactctttgccctttagcttgtacctgattaattaattttcagttaagtgatttgatccgtcatccattcacccaaaaaccattcctggagcacctggcatgtgctgggaatcgcaaacaaagattcagcccttgccctcaagttgctcatagaccaactgaagaggaagtcttggtaaggtgtcatgctatgggggaagtagatggggctggatgggtcagggaaggcttcccggaagagggagtgtctaagtcaagccctgaaggatggatgggagtcagccaagcagagatgggggcaagttttaggcgaggtgaacacacaaacagcaacccggtcagacagaatgcggcaggtcccatcagccacagtgtgtgggagaggggatggggggcagagacaaggagaggggtgagagcggggctcaagatgtgagcgaggtggcatgatgagaggcactgaagggtttcagcagcaacagatcagatttctgtaacagaaagatcactctggctgcaacgtagtggggaacgccaagtgggacctggtcataaccaggtggaggggtggtggtgaccagaatctggaatgagactgtgggtgaggaccgccgggggtgcatagaggcagatgcatgcaagacactaatgcacccctcccgctgctctgcactgtgtcccgggggcactgagccccgggtttctccctctggttgcaccagccaggccccctccctacctgcccctttcctgcatggcaggtctagtgctcctgactgtttccaggtcaggttgagctggcctggcttggaaatatgcttgatggagttctaagcctgctgcagcagggggccaggggtcagggaggtggcagactgccaaggtaggagcctctggttctccccggcctcctagcgactctgctctagggttaacggttctgaaatatatgctgcttaatgctacgtccccaggaagggacccctaacctgctagccctttgtcccgctgggaaaatagctcaattactgccaaaatgagaagctgtcctggggtggatgaagtagcaccaaaggataattagaatgggctggacatgagcagccacttgtttggaaaggtggagggccacgacacagagaccctgggtggcgggggagtcagggtggcggtggaagggcaggagggacccaaggaagccacagagcttttgaccgtctcccattcccccacccctaccctgcagcttcctgccacacgtctcttcctgggatgttaaggaggctggcatggagtcagagtccactcaagaaagcagaaactactggctatactcgcacagaaggaatttgctacagggaactggttgcaggtgataatcagcgagaagcccagcgggggacagtgaggtaacccagagatcggtgacacaagaggcctctaccatccctaggccggaggggtccagggaggaagtgaggttgctggatcccagggcgagtcacccgtccacagggagctggagtcatgagccaaacgcagctgctcatggaagccagtggaggcaggagggaagggagagaccccagcttctctcccttgcctacctcctgtctcctgtcagtgcttcccactggccaagcctaacctgaagccagctgaccggggagcctgggaagccaggaagacagccacctgtgatacaggacagagcagaggcaggacaaggaaaggacctgagaggtcacagcccacgaaggacacagtgggtcgaggtggtagcctgaagccacaaagcacgctagccggggactccacgcgcaccttgtcttccctcccacactgttgggtgatggcggccggctccccatcagcttctggtgccttcgtgataaatgcccacacgctcccaccccagcccgattcatcaagctccccgtggcacgttgcatggccagagaccttgcccaccaggagcttaatctcccagacaaagaacagaaacgcggcctgggccagagacatataacatgttgccgggagtcactgacggtctaagtgagcccaggagcctcgcagctcctgccaggaatggggagggggcggagcggccgaggccttcggttttctccctccttccatctctggtgtcaggggtgacttggaaaggataccccaagtttctctaggccattcttccacctttttctcaacctaacccctcctggaccaagcaggctctaatacagctgttcctttctccttccctcccctccttccttaacatggattaaaagcctccaacacactgtttgctatggacgctgtggatgccatagcgagcaagacaggcctggtccctgccctcacggtgcttacacacgcagagcttctgcaaccttccctagttgtccccctaagggcagggggaccttcagaccaccccaccccgctgctttccaaactcagcttccaagaggaagctgagacccagtccatctggagacccaactccaggcttcccttctgtctccaaccccttttgagtaaaaagagggtcagagaggagagggcactagattcagggggctgtgattggctgccaccagactgatagatgggtgaagagaccaaccaagactgtgggacagccagggtggcaaggcaacctagagtcaggcaggtgccgctgcagtccccaccgcctgccccccacccctcggccagcctgtcccccctgtctggggcccagctctaaatctctctgacataaaatattgtcggagagccacagcacagagagattaaaaaacaataaagagaaagcgaaactctcgtctataattaccagcctctagccggcagcagcagaaacgcactaaaattttaataggaaccactgcatttaatttaacgacacattttttcaattaccagaataattgtcttattcataaaatgagtttcaataaagagggtaattttcctttgtttttattattcatttgtgaaacatatttgagatagaaccccctcatgttaaggcagcttggcgaggacgcatgacatctgtgtcacgcattgaaactggagtggcgcaggggaccctcctgagggggtggccgtccacattgccagctgatggccgagcggtcagtggtcgaggcgcaggtctgagtgtactcggccggagtacccatcatgagccacttagattagcttctcggcactcaagaagtacgtacgagcatcacgcccacttgagctatgagaaactgaggcataaatgggttaagtcacttggcaggatacgggggaacaggatttgagcccggccaggctgactgcagagcttgaggacggtgctactaccctgccaatggaccccgctgtaggctgcttcccagacgaagttccctaagcgacttcatctttgaaccaactcatttgcacttctcgctctggcttcgtttacactgcactctaagccctctccttggcaagttctcaactcgagagcccttgccctgagcctctggctggcgctcagagatgggatgaactgtttggagaggagccgtagaggagaggctcagacccgtttgggttctgggttcctcgagcaccctaatcccaaccctttgggattggctgcagctcccaggtagggcagacggctgcagcgtcacgctgcttctctggatggatgaatgcaaaggcagaggcttctgtgggggctgggagggaagggccagagggagctcttggccccactctgggcatggaggtggccttgagcatggaagcaccttctggggtgtgtgtgtgttctgaataccatcagaggcaagaggcagagatggggcaggacaggccacggggggccagtggtgggagcccaaggctgcctccagtagggaaattgatattgatagaccattctcactgtcaagggctttgagccaggacttactgcctatttaataccagggtctccatagtgaccctggaaggtggatgttattatccccttggtaaagatgacaaaactgaggcctcaagagatcaaacaagtcctgcccaaagtcactgggccagtgagcagcccagtggtgagtcacccccaagccctgccggctgcacctattcctatgatggtgtttcctgcagggagctgccctctcagaagccaggatagcacaaggaaggacagggggggacagagaggtttgaggcccagggtcacccctgagccactacctggccacagcctccatcccacctgcaatctccttcctcgggcctacacctcctgcaggtgaatagcaccacccccaaacccccacccttgttacagcatagccttcacccagggatgccagtcacccccttcctgaggaggtgctggcagagggggcatgaccagctccagcctgagcctcagattcccttcaggctttttgggcataagattggatgcaggagtggtggtttccctactccctccctaggtataaatctggcctgcagaagacctcttcaaggggagatacctagcagccccaacacatccccctgaagccctggcttcttcccattgaggagaggacaggagcatggagggagggttactaggggagctggggccctgaggctcacagggagaggggttttatgtcctccagggggagctgggaccacctattcctaaccctggagcagatcccttgtcctcatcaacccatggtctctgccccctttcaggtcttctacttcttccaggaggccccctgatgaggacagggggcaagtcatcctcccctttggaagcccagtgctttgcgcaatgccaggcacacaggggcagctcatcaatccattatgtaaaggcacctagatgaagcagaaccacttccacactgttatgagccaaacttcctgcccccaaaattcatctgttgaagtcctaagccacggtacctcagaatgcaactaaatttggagataggatctttacagaggtaactaaggttaaatgaagccattggggtgggccctaatcccatgtggctgaagtccttataagcagaggaggtgagggcacaggctcatatggaggaagaacatgtgaagacacagggagaagatggccatctacatgccaaggacagagccttccctcatggcccacagaagaaaacaacccccataacaccttggtcttggacttctggtctctagaattgtgagaaaatgaatttccatcatttcagccagctagtctggtatttgttacagcaactgtaggaaactaatacacacttctgtgcaaatctctttccttccctggaatgcatcctcctctatctctgcaagtgtgagctctgtatgtcaagtcctggctcaaagtccaccttctccaggaagccagctgtgctgtggagctcttgggcatcctttgtagagtattgatttacacttatttatgggttgttctgtaaatgttacaaacccatatttgggttttattacaggatcaaaactctgtgagtttcctcctgccaagacctgagtctcttccatcttcaggagccctcgaggtgctctgagctcaggcagggccttggtgcccagactggctggggaccaggctgggaggaaggaggatgggggagctttgttctgggttggccctctgacagcgccaatccccatctccagccctggtgaaccctagagcttgcattgtctagctgcatatgcagccccgagctgggctatgggcacttggtcttgccctgggaggctatgaattgagcagaggagaggatggtaaccagagagagcaggagtaacaggagtgctgtctatacagatgagccagcgagggcctcatggagggcttgagtctggaactggccttgaaggctggcaggacttggactggttgagggcagggggagctcatctccagtggggagaacagctcatgcaaaggtgtggcatgtgaatgggagtattcctggcctgggggaggcgccattgggagcggtgcactggaccttggactccgcgcagctcatcctcgtctctatgtactgaggatgctgaggcccaggaaaggaaggggctggcccaaggttgctcactgtggtcaggcctctctgcccctgggcctcagaggggacttggaggtcactattccagtccctgccatcaggcaagaatggtggattagcctgaatcccctatcatctccctctctgcctcaatgtcccggagctcaactgggaagatgaggaagggcccaggtgggggtagaggaagtgaggggctgccaggcgccaagaccacataagcagcagatgtcggcggattagcagctctgcttcccaaagctgccggagccacttaatattctgcagaggggatcacttctctttcataaaaagcaaacacgggactgaaatgctgcagactccaaacacctggggaggtttggcggcttgaaaccttgctcctgggaaagacacagagagtcaggggggaccagggagtcagccctccttgctggccagaagcagtggatggtccctgcagggagacaggcagtggatgcacagatgggcttgagcttctggggtttccagggaaaggcaggggctttgggagacatgggggcactgtccatggggcttgggcttggggtggacagttggcaaagtgatggcactcagtggaagtcactgccaggaaacgacacatgcagggaccattcctctccctcttaatgaccccagacatcgggaatggaggcacagccactgaggcagatcaccaagatgggaagcggcaggttctttccaaacaaacagatcaacagagcaaaacagctaacagctttagttaaatacaaataattccaagaagccagcggcaagcttttaccttcggagtttgggttttttttattgttgttgttgtttaataaaggaagacgactttctttgattagacagagctcactttatccagatgggaaagaaatacaatggctctctcttggcttcctccgaagagccaggtatgtctgggcagcccatctgggcgatgctcactggacatgaggctgtgtatggtcagatgtttatgtaccgtgactcatttttggtagaggcattcacgtttgacctgcacatgattcttcttttaagcacacattttaggaaaaatatttgctgaattcttatgcggctgttggcattgctgttattgtatggttgttaccatttgttcccctttgggaacctgtttccggttttgaaaggacttcagtagatgttaataactcagcttgcctgggtggaagtctaacctggcagctgtcagcacaaattctggagccagaccacctgggttcacatctgagctctgccctgtattgcttttgaggggattttctaagcctcagttttctcttctgtaaaatgggggtgatgatgatcatagaaactctctcacaggggctttgtgaggattgtgtgagttaaacacacaaggaaattagcaccagattgacagtatggggctatgattactgagattggaaacaaaccttagcaaatttcattcttctaagctaggcaaaggccacgcagcagctagaaagtgcagacactggggttggccttatgtgggtttgaattctccagaatattctggctgtataaaaccgagcaaatcaatttctctgggctttggcctccttatctatacaatgggaataatgagaactcattcctcataagaagtaagtttcaactgaagctcatggaatgacacagttcatagcgcacgctcaacaaatggtggctgccccagtgaacaagctcgaccttgccaaggcttacctcaaaggctttgcaggagctgctgtacctcgagatttttttttttttttgagacagggtcttgcctgtcgcccaggctggagtgcagtggcacgatctcggctcactgcaacctccacctcctgggttcaagcaattctcctgcctcagcctcctgagtagctgggattacaggtgtgtaccaccacatctggctaagttttgtatttttattagagatggagtttcaccatgttggccaggctggtcttgaacatctgccctcaagtggtctgcctacctcagcttcccaaagtgctaggattacaggcatgagccactgtgcccagccagataaaatattataatgtttcctttcttcttcccatcctcctcctcctcctctctctctctttctctcttactttctttccctgcctcctaatctccctcttttctttccttccttgtttttgggttggaggtcctctttcaatagagggtagagagaacccaaagtgtcaaagccctgccattctaatttcctttcccattaacaggagttccttaaactctgtgagtccagatttcctgccctcagtaaggtctgcctgcagcctctaccaggtagtgatacgatgggcacctctggactcagcagtagaaatggcagccagtggcattgacctggattcactcatcctctctctcagcctctccccagggctccctggacaaccaagtccagctctcttgttctaggaccctcctcaccctgttgctctatccccctttgtcctgccccatccccaacaccatgggctgggtgccctgggggcacttagcagcccgagctgccacctgggagtgaagcgccttctgctgaggcaggaggggtgcaggtctgctgtaaaggggcagccccaaagttctgccagtagattgatggggagtaaagactctgaccccacagcctcactgagcacatgtcagaggggctggcaaatctgaaaagatgtggctgtgactagctctgcctagggttctgccagatttcctgtggaaccttccagaatttctccattaatgacaacgaccatgcccaggtagagatggaaagagactcggatgccttattctgaaattaacttcagttaggaaggaagggaaggagggagggaggaagggagggaggggagagggaggaagaaaggaaggaagggaggaagggagggaggaacagaataatattcaagcactttttcatggcactttaaaatgttcaagcacttttgcattgactgtatctccttttatcatccagcctgtgaagttcacagctcagcattattaggcagtggactatggaggacccacacacagccaggttcaaatccagcttcattagacagatgaagaaaccaaggcccaatgagatggagtgcctttcccacctcacatgggaagtcagtgcccaagttaacagaacttcagggcccccgcaccaagccatgtgtctctcctacaagatcctggaggatgggctctcaaatggggtctcaaccctccccctagataggagctctttgcctggcttctggaactgtgggccaccagtccctacagaatgagaggtactctcactcactgcagtagcggcctggagagaaaacgcctgcctccctggctctgtctgcagcctggctcccaggacgtggcctcatttcaaagactaaaaaggtagctgagaaacaaacgaaagttagctgagatgggaaaaccacccatgggaaggaaagaatgcaccatctcctccccttttctctcttctctatggggagaaagaaaaacctaaatactgatttcaactggactctcctgcctgcaccggggccccacaagcaacacccagatcctgaaagtatttgttccagtcaatggggcagagtgacccacgaaggacagagcatgcctgccgagttcacacacttcctgcctgcctctgggaaaactatttaacctctctgagccttgggtttcctcgctggtaaagtagagatggtggcgatacatgtgccatggagtggcaatgaggatgaaatgggacaatgtacgcaagactgttggcaagaagcaaggagttgataaatggaatagacgatataacaattacattgtaatgtgtattataattctttttgcgggctcttgagaatgagaactctctgccaacgtggagaatgagaggggcagatgggaagaacactgagataagagcagtaagtcttgagcaggatggtgtgggggcaagctctgtccatccgccactccccactccgctccctgtgccccccgcccccgccaccataccacacatgtcaccatactgtggctgctctccagcctccgaagggccaccccacaggcaggtctgcagcctgaacaggatgggacaggtaaggttggcccctccccctttcttttcttccctacctccctgtcctgctagagacaagtgcccctaatgcctgtgctcccgaatcataatgccacaaaaaccttgctgagataggatgagagaaagagagggtctgagacaactcaaagcctttagtccctggcctgatccccccagggctgggcaccagctggttgtcttggcctcactaagcatttcctctgtatctttagcttgctgggctcagtggcagtcacccctgggagggatggcatgaagggctgggggttcctctgggccatcacaccacgggaagcgggtctatggccccaagggtcctgccttggccctactgagaccaggcagtgaactatggaggacccgcacacagagccaggttcaaatccagctaagggcaaactgcctaagctcttacagcctcagtttcctcactaaaaggatgcagtcactcctagtgccaccaccaaaaaccacaataaatgacagacaaggtgttgttagaaagactgaataaccagaaatgttcatggaaatgacagctgggctgcagggctggagctgggctggaggctgctctgcacccgaccgtgcctcgcattaaccctttattgtttttgtttgtttgtttttgagacggagccttgctctgtcgcccaggctggagtgtagtggtgcatcttggcttactgcaacctccacctcccagattcaagcaattctctgtctcagcctcctgagtagctgggactacaggcgtgcgccaccatgcgcgtctaatttttgtatttttagtagagacggtgtttcaccatgttggccaggctggtctcgaactcctgacctcaagtgatccgcctgcctcggcctcccaaagtgctgggattacaggcatgagccacctcgcctggcctcattaacccttcaggtgtggaacatggaacatttcagagatgtcaggacagcagctgtttaccagctgtgtaaatacagaacttcaaaatccaagcacccgcatgttggtggggagtcctggggaccacacaccctgcttacagggctactgtgagggttggtcagatcatggagccactggtgcccaccccctcccgatcctgattcaggagcacacaggctcctcgaccagtgggtggcgtctgggccagcaaggacttgtggcaggagacaggatcctctttgaggtcaggaagcggggcgtgtggggtgtgccactgggccaggcatgtccctgctcatcccacccagaccaggcacagcaaaatcaggaccccctcctcaccccactacccacaggtacaggaaagaggagagacccagcctcgctcctggtcactctgcccaagcttttggggacctggccagtgctccaccccagactccacaacttggcatttctagctgtgcccgagatggggccaagggaggggccaagcgagctattttgggtctggaaagagctgtggtgggtgtgaaagggagacaattacggggttggtagggccgatgccttccacccacaccacccaccccacctgcggtcagccctcagcctggcctcagcacagatgatgacgagacctagggggaagtgggaggtagagaggaaagtctccaaaaggggctagggtagggagagaagacgtcagcacagggccacctgggaggaccccaaatggtgacgtggctgcagagttgtggccaagaagccatggttctctgggctgccatggagaaggagcagtcagccgccttcttcaggccatactgtgtggttgttgtcctgggctctaggagacatgacacagggtcattttgggggcactggggatcactatgtcatgggccatcttcctgtacgtggctgaggtctggcctctggtggcctccaatggctacacgcctaggccaggaacaagtagagtggccttagagtggggagcactgtgcagactcctgtacggcctcccctgaattgagtctctgctctcaaggactctgttccagggctggatgaagggagccgaatgagggactgtgtgcaacatataaaggaggggctatcaaaaatcctagtcatcaagataaataacattgtaggccaagtgcagtggctcacgcctgtaatcccagcactttggggggctgaggcgggtggatcacctgaggtcaggagttcgagaccagcctgatcaacatggtgaaactccgtctctactaaaaatacaaaaattagctgggcgtggtggtgtgcgcctgtaatcccagctgcttgggaggctaaggcaggagaattgcttgaacccgggaggcagaggttgcagtgagccgagatcttgccactgcactccaacctgggcgacagagcgaaactccgtctcaaaaaaaagacaaataacatcttaatataatatttcaaaggatccaagtcaaagcaaaaaatttaatatgaacaccaccaaaatgttacaaaaagacacgctccaacggggctgcaacagcctccaaggtaccaggatggttcccatctttatcggacgttttgatattttgttccttgtggaatttttgcattaatttgcattttaaaaatattacattcaaatatcatttgtttaattactgaattttgggagcacccccctaagattttgggcttggtcttgtatctgttctctttttagatccaattaacttgcctgttcctcccacctccctccagaagttaggccaggtgaaaacacaagagaacaacagccacgtggaatctgggggaacatgaggccaggcacttctcaaagaagagagagagacaggagaggcggggagaagaaggcaggcgtgggagggggttgggaggtggttctgagtgtctgtccaggctgccggacaaggatgaggatggggagatgaggatgagacctggggctgggactgtcagaaagagtggggaaaagggagagagaagcagagcacagagaaagaagtaagaaagaaaaattaccagcaaggcattctgtgcggaaggcgccacgggctgctggaaatgccacgtctgcgttttgtaagctttactaagacgtgctaactcatttcatcctggcagcagccgcacgaggcaggttatacctcttttcccatttgatgatgggtaaattgaggcacgcagaagcaccaaggctgtagggctgtgctgaagctggaataccagcccaggcagtctgactcggacctgggcacttgaagccatttctggaagggaggaggaaggcaggggaggggaaggacagctccgctctgataccgcctcactgcctgccgccccaccctggtcctcgggccattgctggcgaggaggcttggacaggcacgcaccatggaggagactcatggcctctggcaaggctgggataagatgaagtgagtcactgtcaacttctcttcgaaccagaaatatcctcccccagaagtatcaggcaaatctaatttttataaatcacattatagctcaaatatcttagggaattcacaacttataaacatttctggctgggtgcagtgacttacacctgtcatcccaacactttgggaggcgggggcaggagaatcgcttgaggccaagagttcaaggccagcctgggcaacacagtgagaccccacctctacaaaaaataagataaaaaattagctgggtgcggtggcacacggctgtagtcccagctgctcagaaggctgaatgtgggaggattgcacgagcccaggagtttgaggctgcagtgagctatgaacaggccactgccctccagtttggaagacagaatgagactctgtctcttaaaaaaaaatctttgtgcccttttgtaatcattctctaatatatctatctctgagtttgatattcattgagcaactttgtagtacaacagtgctctgaaagggtcaattttaggtatacatattttgggggcagggttgagatgagtgaaatcccatttcaaatggcctaggtgagtcttcttttttctctcactgatttttttttttttgagacagggtctccctctgtcatccaggctggagtgcgatggcaccatcatggcttactgcagccttaacgttcccaactcaagtcatcctccctccttagcctcccgagtagcatgtgccaccacgctcagctaattttttatattttttgtagagacacggctttgccatgttgcccaggctggcctcaaactcctaggctcaagcgatccacccaccttgtttcacacacccggcctcccaaagtgctggaactacaggtatgagccgctgtgcccagcccccagtaaatctttttgaaaacttcttttgtattcaccttgctttacgtttttctgtaaattcacacttcaatttcttggatttacttagagctgttcgatacggtaaccaatagccacatatagctatttaagttaattaaaattaaataaaattaaaaattcagtttctcagtagcactggccacatatggctagtgactaccatgttgggcagcacagacaacagaatacttctatcactacagaaagttctactggacactactggcttagagtataaagtccacttgagtccatttctgcttaaagtgaggcaggtgtgtattctctcctgcatctgagcccctgggctgtgtcgtcatctgaacaactgatttaactaattccactggatgtacgtgtgacccagagaggtgcctggtgtcctgccctgctccctccccatgacattaaaacgaaacagctggggctgggcatggtggctcacgcctgtaatcccagcactttgggaggtcgagacaggtggatcacttgaggccaggagtttgagaccagcctggccaacagggtgaaactctgtctctactaaaaatacaaaaattagctgggcatggtggcgtatacctgcagtcccatctactcgggaggctgaggcaggaggatcgcttgaacctgggaggcggaggttgcagtgggccgagatcgcgccactgcactccagcttgggggacagagagagactctgtctgaaaaaaaaacaaaaaacaaaaacaaacccaaaacaaaagactaaacagctgggctttgggcatctggtaagggtggagtggctgctgttagttaggtcaaccctttccccagatagcaataaacaactgcctgaggcattggagaacaaccaaaagcaggctgacactagagggaagtcaatgtttagaagatagaaatggcactgggtgaacttcccatatttatgggtatttgtttgaggtcaggctctagctcctgccaagtggggtggctaaatccagatagaaaatccagtcttactggcttaaacaactagaggacagagtttgcggcaaccgcagcagttggaagttgagggcaggaatcccagaaggaggagagccagagggaggagacctgaattctgtatataaattctacccaaaccttaggctgatctctgaaatatgtacacatggggccaatcccaagcagcccagcaaaggctagagggactgaacagagatttctgctactgtcaaccacaggggagagcaagtttggagtttgagtgcagggaagttacctgtttgctaaaaaacatgtaattcatgacatctaggatacattccaaaattcctaggcacatgaagaaacaggaaaatgtgatccctacacaatagaaaaggcaatcaatacagattgttttaaaacagctattataactatcctcaaggacataaagaaaaatgtggtcataatgaatgaacaaatagaaaatcttagtaggaaaataaaaagcataaaaagaaccacataaaaattctagatctctaatatggttcaggtatttatcccctccaaatctcatgtggaaatgcgatctccagtgttagaggtgcagtctagcgggtggtgtttgggtaagggggttcccccatgaacggcttggtgcccttcccatggtagtgagctctcgttctgttagagagctagttgttttttctttttttggtttgtttgtttgtttgtttttttgagatggagtctggccctgtcgccaggctgtagtgcaatagcgcaatctcagctcactgcaagctccgcctcccaggttcaagcgattctcctgcctcagcctcctgagtagctgggactacgggcgcatgccaccacacccagctaatttttgtatttttagtagagacgggtttcaccatgttggccaggatggtctcaatctcctgacctcatgatccacccaccttggcctcccaaagtcctgggattacaggcgtgaggcactgcccccagccaagagctggttgtttaaaagagcctggcacctcctgccttctaacttgcttcttctttctccatctgacacatctgctctccccttcaacttctggcatgagtggaagcttcctgaggcctcaccagaaacaggtgccaacactatgcttcttgtacagcctccagaactataagccaaataaaattcttatatatatatgtgtgtgtgtgtgtgtgtgtgtgtgtgtgtgtgtgttacccagtctcaggtattcctttacagcaatgcaaacagacaagtacagaaaactggtactgagagtggagtgttgctataaagatacttgaaaatgttgaaacagctttgaaattaggtaatgaacaaaggttgaaagagtttggtgggttcaaaaatagacaaaaacatgacataaagtttagaacttcttagcgactagttaaatggttgtaaccaaagtcctgatagaaatatagatagcaaagcccaggctgatgaggtttcagaggaaaacaaacacttattaaaaactggagtgaagatcaccctggttatgccttaataaaaatctgggctacactgtgtctatggcttagggctttatgagagacaccacttacaagtaataacccaagatatctggcaaaagaaatttctaaacgacaaagcactcaaaatgtggcctgggtgcttctaacttcctacgactagatatgagaacaaaaaaacgacttaaatttaacacttataattaaaaaaaaaaaaaaagcagagtgtaaaaacttagaaaatttccagcttggccatgaggtagagaacaaaagtgcctttccagtgagaaacccaaggcacttgtaagataacctcctgctagataaatttacatgactaaacgggagtcaagcacgaataacaaagacactggaaaaaaaaagacctggaagacatttggaaggtctttggggaaaatcccttccatgacaggcccagaggcctaaaaaatggttttaggggccaggcctggatccctgctgccctctgcggccccaggaggctgctccctgcatccctggctgcttcagctccagccagggctcaaagaaccccaggtaccattcagggctccacttcagagggcatacgccataagacttggcagcttccacatggtgaagcctgcaggcacacagaatacaaaagtgaaagaggcttggcagcttcctcctagatttcagaagatgtattaaaaaacttgggtgcccagacaaggcctgccacggggcggagcccccacagaaggcctctgctagggcagtgtcaagcaaaaacgtggggttgaagctcccacagggtcctcaccgggacactgcctggtgaagctgtggaaatggggctaccagcctccagacctcagcgtggtacagccaccaacagcttacaacctcaacatgaacaggcaccagactccaacccgttaaaaacagccaggggggctgtgccttacaaagccagaggggtggagctgcccaggccttgggagcccaaccctcacaccagtgtgcccaggatgtgggacatggagtcaagagagattatttcagagctttaaggtttaacacctgccctgctgggtttcggacttgggtagggtctgtcatttctttcttttggttgatttctcccttttgaaatgaaaatgtttacctcatgcctgtaccaccattgtatcttgaaagtaaatcacttggttttgcttttacacattcataaatttaaaacaacttgccttgagtctcaaatgagactttaaactttttgagttgatactcaaatgagtttagactttcaaggactattggaaaaaaatgattatattttacaatgtaaaaatgacatgaaatttaggaggccaggagtggaatgatatggtttggatatgtgtcccctccaaatctcatgtggaaaccggatcctaaatgttagaaatggggcctgggggagatgtttgtgttgggaggcagatcccttggtgcccttcccacggtaatgggtgaattctcgctctgttagttcacaagagagctggttgtttaaaggaggctggcaccttctccccctctctcttgcaccctctatctctctttttctctatgtgacacaactgctccctcttttctttctgccagtgagtggaagcttcttgagcccctcgctagaaagatgctagtgccatgcttcctgtacagcctatagaaccgtgagccaaatacacgtctcttctttatacattatccagcctcaggtattcctttataacaatgcaaaatggactaatacaagctgaatacaagatctgaaattaaaaatttattggatagatttaacagcagattgatgagaacagaagagtcaatgaatgtgaaaatagatcaataaaaaatacccaccctgaagaaccagcagaaaagaagactttaaaaaaagcccagagcctcagactggagatgaaggtctaacatatattatacatgaagtctaggaagagtcaggagtgaatgaatgcataaaaagtagttaaaggaataagggctgaaaattccccaaatttggagaaagacaaattgaagattcaagaggctcaatgaaccccaagcaggataaatacaaggagaagagtcgttaaacaggcgactgcagaaggaaggaacatgctttatcttcaaaccgctggacagcagggcccacctctctgcaggcttcatgtacttttgtgatacatcacatgacaatattgccatcgtctccctaaaaagtgcacacagggggcaaaggttgaaaaagcacctattatgtgctaatggcctttgtgtatattttcttaatttacactcatagtaaccacaagaaccaggaactgctgtctccaagttgttttattattaattttttaaaaaccaaaatcagcactaaggctcagagatgttgagtaactcacctaagatcacacagctagtagtaagagatagagctggggttgaaagcctagttccaaagcccatgttctttctttctttcttttcttttttttttttttttgagatggagtctcactctgtcgcccaggctggagggcaatggcgtcatctcagctcattgcaacctccgcctcccaggttcaagtgattctcctgcctcagcctcctgagtagctgggattacgggcgcacgccaccacacccagctaatttttgtatttttagtagagacggggtttcaccttgttggctgggctggtctcaaactcctgaccttaggtgatctgcccacctgggcctcccaaagtgctgggattacaggcgtgaggcaccgtgctgggccccatgttattttgtattcgtgcctattaacccttgcagcacattggaatcacgtggtgagggatgggggtggggattgctttcaaaagcaatccccacccccaacgaattaaatcagaattagtcagggctgcatccaggcattggaatttttttttttcagcccctctgtgtgattttaaggtctgatgtggattgaaagtcactgttgtacactatgctgcactctgggaaagatcagacgagaaaagaaaactgggtcaatcccactcacattggtagatgggcgatgagaacccccgcaaaggtcctcagaacggagctccgagccttgatctgtaagcctgtacccttccttccttgtcttttcctgatctctaggagctacacggctgtcaccactctcaggtccagaagatatgggggtgataaaagcggccgaggagcctctctgcagcaggtcctgagttacgggaggctgcagccatggacacgggacacttactctgggtgaaggatgaggagcaggacctcagcgctctaactctttcaggcttcggctggggaaggaagagagtcaggcggccccatgactctccccagagcccctcgggacggccccccagagcccctcttggggagagactgggactgctgagcttggtggacacagggcgaccaccccaggggcccagccttgctacctcccctccctgtttacacccctgcctcctaagcacagcccggcctcaacatgcatctcctaccaccccataggagtggtagaccccgtctacaccgggtccagaaaccacacaacccataggttctgtgagctcctggctctgttttctcaaatcgcagcagagcatatgctcaataaagagcctccaggtgcatgtgagggtgggtgaggtggctcccactgctggctgggtgagcagttggtgccgctttgccatttgccactagattagcccaaaaatcaaaaagagggggacccacccagcacccctcttgtgatgatggcggtgatggtgatggtgaggctgatggtggtgatgttgccaccttccactgagcgctgactacccgtgaggcactgaacaccaccatcagctcaccgccatctcgcagccacccacaaagggcactgctttagctctgttttacagatgggaaggctgaggctcagagaagatcaagtccttgcccgtggcagaactcatatcaaagccaggtcagtctctaacaccggagccctttggaggggccctcttctacccattcctgtgttcttcctgcccctcactggactgaactgagtttagcccgaaatgctcctcccaggcctgcagggacatggctgacctcacatgctctgtgccccctttagggtctctgctcccctattcctcctcagcccacagcctggggtcaagggtgactattgtgagccctggtctggtcctgagtggctgctgggaccttcccaatgcctgggtgaaactccagagaacgaactctgggccagcaggagtttgctgggaagtggctgcaggaggtggctcgggttttttttttttgagatggagtcttgatctgtcactgaggctggaaggagtgcagtggtgcgatctcggctcactgtaatctccgcctcccaggttcaagcgattctccagcctcagcttcccgagtaactgggattacaggcgtgagccaccatgcccagctcgggtctctttctgtcaaggcaatgaagaggctaaggagggtgacagaggagccccctgagccccaggcatggtgggctgtggacccaaccaccggcttcctgcctcactgaggcaccagggcgaagacactgatattcagtactagcaaccccacagccagtagatagtcaagttccctgccctttccaatgcccacaggacactctgggtcactcagggagctcggtggcccacccaggcccaaccctgagcccatcgatctgggtcctggggggaacatgtgggagtccagcccggtggccccccgggcgctctaagcagcctgtgcctaatgaccgcagaaagccattacagctcacttagctgtaaacagctctccacagcactcattagggccgaggagctccgagagctctcctcctcgggtgtggggcatgtgcccagcgggggctacgccttcttactggaaacaccgtttcccgcccggcctgccttccaggaaaggtgagcccggctggggcccggccagcgccctgccctcccctgccctctctgaccggggtctgaccctccacaggggctctctcctccctgggcatttcccagcctgcaggggcccagggacaggacaggcagagccccaggtgcccccttgacaacacatgccgggctttccatggccaacctcacggcccacggggaaggaggagcgcccgcggggccagctcccctgggtgggccagcaccctgggcatgccgggccaggcgggtgcccacagagactcccctcctccctatgatggggatgtgcctgggaaagatggacagttctggggcctaaactgcaggcggacaagacctcggcattcagtgcaggtgttgtcttctaccaaatcagagctgtccaaatggttttagattcggtccccacaaaatcctgttgagggtcccaagagatataacagaggtaagggtggttgtcctcatctaagtgggggtgagggtggggtccacagcctgtctgttttgctgtttccctccctccccactttgtcctatcccctacctgccgtgagggctcagttatccctgtagaattctggggtctgcagacacagtttagtaaccactggcctgcaccacgcactgttttctgtgcctggagcgctccgacccctcttcctagccagctcccatccacccccacatcctgatggcaccctgtccccagccctgccctcccttcctctcatgccagcctccctcttatcacccagctcttcaccttcttagcatacccctacattttccagtgatatttctatttgtgtagttatttgcttatcgccttcctattccctgagctctgtagggaggaagaccatgtctgtttttgtctcatctccagcatgagcccagtgctaggcacacagcaggcagtccataaagattgactgactgactgaatgaatgaatggtctaagcatatgatgctcagcttgctggagaaggggcatcaacatcttcctatcattgaccccttctgtgtcctcagccctcatgactgatgtgtcttccatctactcctccaccccaatctggtcagtatctacttgtcctttatctttcatctgagatacttcctcccggggagcctcccagcgccgtcaaacacccagcatgctcacttgtaatggcgccttcttatctctttcttcctggaccaggaagcagagcacaggtgtctagtgtcaacacatgccaaggtgtccagtgcaggtgtgccacatgaaggaacgggtgactgccccatggccctgctactatggggcaacaccacctccttggaggctgatgacctgctcatataggatggggcctctccatcctccacttcctcacaatcagcacccccagacaccttcccaatgtctgagcaaaactctgcagagaacacactctgggccagcaggcggtcgttgggcaatggaagtgggtgcacgaggtggctcgggtctctctttgggttgagacaatgatgagtctaaggagggtgagtgaggagcctcagagctccagcgtggtgggctggggacccaaccatcagcttcctgcctcactgctgcaccagggaaaggacactggtacctggcactagcaggcccacagccagtagataggtcactctgcacccccttcccaacccagttccccagaggcttctccatctcaggaatggtcacctctacccttcacccagctgctaggaccccaaaccttggagtcgtcattcagtccatcagctcggcacatcctgctggctctacccgccaaacgcaccttgaatctaactgctgctcaccacccatgttgccatcaccctgggcagcaccaccaccagctctggcctggaccacagcctcctcccaggcatgcctgctcccctccgctccctgagccttagccccacatggcagccagagggattgatttaatgcataaattggatcatgccactacctggctcaaagcctccagtgactgccactcacacccagtcaaatccagagtccagactgcaacctgcaaaggcctgtgtggatgggcccctggctctcctgtgctccagcctcctctccacacatgcccaaccctgccctttatccgggccttgctctcaggggccctgggctccgccgtctctgcccccttccaaatgtcacctccccgaccatgaggaccactccagtgccactccccagacctgctggcttcttcctggccttcgtgggccctgtcccttcctgacactaccgctcacatctatgcgcttcctcactgtctgcctgacctcaggaatggaagctctgcccacatctatgcatttcctcactgtttgcccgaccctcaggaatggaagctccatgaaggcaaggacttttgtctgtgttgtttggctcctgtcccttcagcccctagaacattgcctaatacaccaataaatatttatcacatgaatatttatgtaatatctattaatttaggggtaggtgacacaagtatttgttacatgaatggatacttttaaatccattgttgattaattgatcagttccccttggttaaatttgtttataaaagaacatcagatccaaccctgatcacagctgacatcacgtgcatgcacatgtgtacgtgcacacacaagcacacatgcacacatacacgcctcgctgatcagccttattagttttttctctccctttttcccagtagctgcaacttcaggagactaccttgtgtgtgagtgcaggagatgggggtggatctttccctcaaggccagccctccccaccaggctcagctatcagccaggagacaaggtcctctgtgggcacaccatcacctctacctccccttcggaaccaaggcaagctctaaatgccttgcccttgcttccttcctaaacatttaatgccatactggccttctccacctctctagacactttctaccaccctggcttatgctagaagatcagatgctcctggtaataatgacccaagtacaacttaaccaagagggtgagtcttgagtcttgagaagtatgagtctctggtggaaacccagtggaacaccctagagggtgctgggtttggaggctataccaacagaccaagagttcaagtcttgcaccttagtagaggccagccctaggacttagggaagccatctgtcctctctgctcaaggtttcagtgactggttggctaaaggactgctcgtatagtctcagacaattaaccttccttgagcccctgttagtgggaggctgggctctgcctgggtttgggaatctggaagatgggcatatcccctgggaatcaaacagtcctggctctgctgcttccccttggggtgatcctgggcaggctgctgaagctccctgggctccaggctcctcaatggggcgaatgacacctgcatcgggaagatcaaagccactgctgagttctaatttgacctgggccatcctgtgacaactcttgtaatcaaagaaaccctgggttctccctcatggactccaaatctgccccaatcactccagggctctcagaaggagccactctgaaccagcacttcattctttcactcgttcattcaccaggtatttccagaacgcctgccagttccaggcatcatgtgaggctgtgaaaagtggcatagcaatgtggacgagagcttggattctgaggtagactcatttggggctgaagcactatctcttgctagccatgacctgggggcaaaacacgtaatctctccgtgccagtctgtactatatctgcagaatagagcagtcatcacagttatctcaccaggtggtgatcaggattaaacgagttaatatgtgtaaagcatgtaggattgcgtctggcacttggcaagtaagatatgattgttgtctttgtaattatggaattaaagttgaatagacaatctttgtgctcaaggagctcagcttagcgtgggagacagagcatacacagacaacggcaacgcagcagcgctagggctaggagaggaagacgaacaaaagctggggctgtggattctcacgaaggggcagggcctgctcttgaggggctcacagtctcaagggggagaggaggtataaaaagggagagcaaagtcaaccaaaattccacaccgtctgcagcccaatacatgcagcactgagctgggggccgtgggggatgacttcagcaaaagacacgcctgtggtgggatgaggaagtttgcaccaaggacagaggcagggcaactaggttcctattgaacaggaccaaaaggcagccaaattctcgaggcaaaaggggctgcctgggatgcctgggaggaaggtgagtgtgggaaagttaagatgatgaaatcatgaggatgggtgtcccaaggaaaggaagggaaaggcatcccaaagaaggggagggaacgtcccaaggatgagaaagtcatcccaaggatgggaaagagcatgccaaggatgggaagggtgtccccaaggaagggaaaggcgtcccaaggatcagaagggcatccccaaaaatgggaagcgcgtcccaaggatgagaggggcgtcccaaggatgggaaggacatcccaaggaagggaggggtgtcacaaggatatgaagggcatgtcattccaagcagtaaaatggcagaagcaaagaggcatggatagagaggaaagggctttgagggagagtgagccaggcaggcttgccggacacaggtggagttccatgagagagggtgagacatccaaggcacagctggctagaacaaattctcatcactgtccaacatcatggcctaagaaaatgcaactcaatgtactgcaaatacaaaattggtgcatgtaaaaggaacctcgtgatcacaggtgtagtacactcccccagagaggccagggggttgccagtacctataggtctccctcacccagtaggacttggccaagctattgttgacagtgaatttttacagccactgctataaaaccttcagccttaactaccttgctctgctatggctggcaaccccagggtaccactaatgctgccctattagcgtccaaagcattctgtgcaattctgagaacaagccctgattaccaaggcccccaggatgccatgggaatcgccaaggatacactgtggcctctgaacagcagaggcttcggagcgtgggagtggccctgctgccatctcccaggtcccatggcagcctcacctgcaatcccttccaggaagcatgtcccctatgggagggtccaggctagagaaaggacacggactggatatggaggtgtagaccccaaagagccttggaatgactgtcctggaagcagatccttggacctgaaatccgggtccagagatggacacagaagagtgaaggaatttcatccacaggtactgttagccgaggtttaggaacccataaagagacctgtaaagtcttcagtggaatttatccaaaaaaactcttaagtggaatccattggcaccaaagttccaggaccaatcccagttattcattttcttatttactcaacaaacatatactaagcatccaccccatcacaggcactgggctgggtcccagagacagacaggcagaaagctgacagtccctgcactcaagaagccgtaagttcagtgggggagagagggtccccagctggtgtggagagtggagggcaatagttctacccttcagggctgcgggcataggactgtttatatcacaggtcagtttcctccaggatatcaaggtgtccttcatttttaccagtgctggagtcagttctccctgagagaggcaggtgctgtgggggagggaggagaccatctctacctgggcgtgaatcctgctcctcccttatgagcttggtgacactaggtaaacccttgactttcttatgccccagtttcctcacgtgtaaaatagcaatgatgattgtctgtggtcagcagaatgacacctccatagaagtccatgccctgatccctggaacctgtgaatacgttctgttatgtggcaaagatggaattaaggttgctaatcagatgatttaagatagggagactatcctgaattctgagtgggaccagtgtaacatgagggtcctgaaatgcagaagaggacggcagaaggggagtgagtgtcagaacgacgtggcaggagagcaggcagcttctaaaaactgcaaaaggcaagaagatgggttctcctccagggtcttgagccctatggacatctttttttttttttttttgagatggagtctcgctctgtcacccaggctggagtgcaatggtgcgatctcagctcactgcaacatccacctccctggttcaagcaattcccctgcctcaacctcccgagtagctgggattacaggcacacaccaccatacctggctaatgttttgtgtgtatttttagtagagatggggtttcaccatgttgggcagactggtctcaaactcctgacttcaggcaatctgcccgcctcggcctcccaaagtgctgggattacaggcgtgagccaccacacccagcttgaacatcttgattttagcccagtgaggctcattttggacctctgacctcccaaactgtaagataacaaatttgtattgttttgagccaccacatttggggtcattttgttacagcatcccagaagctcacacaccacagtggtccctacctcccagggttgtgacaattaatgactcggtgacacacagcaaacagaggagtgtgattatttggggagctgggaggacatggttctgcagaccaggcctgggttgggggctcctactggagacagcatgaaggtcccggagcccttggcacagaggacactcaggtcaaagggtcaggggcagggattggggttgggccaacagtgtgagaggctgagttagctggagcacctcaggcagggaaggtggactcagcttatccacccagccattcgcgccagcccaacctgaggcacagtctaggccgaccccacttcccattcgaagcttcatccctgggttgtcacaggttgcctgagctccagccctcacttctctctctgcccagtgtctctaaggcaccccaaagtcactctgtcccagaccaagctccccacatcaccatctcaggcttcctctccagcgtggtctccttctggaaggggcaccccttgtcggccgggtcagggacccaggagccatccccacccctcccttcccctcggcatcctcactggttcctcctgggccctgccagttctagctctttcctctggtgttcttccacatctctccatccctattgctgcacgtctggcctgagctcctgccacctctgcctgccccttcaagagcctctcactcatcctccgcagtctccccaggctcttctcatcaccgcagtcacagatccaagtgatcatctcaagattaaatcctaccaggctttgggaatagagaccatgtttcttatcagggcccgaggggtcaggcctctgctgccctctgcaactttatggggcactgctttccagaatcttcctcatgctcttgcctatcacacagccctttggcagcaccctgcatcctcttactcaggcttctcgcacggtgctccccctccctgaagagtctccccgaccctcactgactgagctcacgtagcgcttctcaggaagctgtgatgggctgaattgccctacccaccccagaatccagatgttgaagtcctaacccctgcacctcagcatgcagcagtgtttgcagatagggtctttgcagaggtcactgaggtaaaatgaggtcagtaggatgggccctaatccaatatgactgatgtctttataagaagagattagaggctggacgcggtggctcacgcctgtaatcccagcactttgggaggccaaggcaggtggatcacctgaggtcgggagttcaagaccagcctggccaacatggtgaaaccccatctctactaaaaacacaaaaattagctgggggttggtgaagggcacctgtaatcccagctactagggaggctgaggcacaaaaactgcttggacctgggaggtggaggtggcagtgagctgagatcgcaccactgcattccagcctgggggacaagagcgaaaccccgtctcaaaaagaaaaaagaaaaaaaaaaaaaagagaggttaggatgcagacacacagagggaagatgatgtgaagatggccatctatgatcaaagagagacacctcagaagaaagcgacctgaagacaccttggtcttggacttccagcctccaggactgcggaacaattcatttctgttatggccatcctagcaaatgaaaacagacgccttccctgccccctcacctgcagtgggttctcctttctgttagacactcccgcctgcctcattcctctccctcttggcacataccaacgtgtaattacacagcctctgccaggctgcaaagccccctcttttcccacagatgctctgaggacatggtttgctttccaggccaaaatctgttataaccactccctggtgttagcacccctttccatggggcccccagctctgtactgtaccctgagtaaggctgttgccccctcgcagggacagccttcctgaccagcactggcttctccggaacaccggggctcacgccgacccagggccagcttcatgggcatgagatccatgtggtcacacagggccccaagctcagagggacccgtgcttggtttaatgttttgctgttgccatcttgaaattcttaatgccttcatctttgaacttgtgctttgtaagtgaagtggaacaatggcacatatgtgtaagcggaggagctacacaaagaaggaaaaaggttggtattttagtacaggctgagtatcctgtatgtaaaaggcttgggacccaaagcgttttggatttgcgatttttttcagattttgaaatatttgcgttatatacttaccactgaacatcccaaataggaaaatccaaaatctgaaaattgtgagcactgacatgacattcaaaggaaacgctcattggagcattttgaatttttgagtcagggtcttgctctctcatccaggctggagtgcagtggtatgaatactgctcactgcagcctcgaactcctgggctcaagtgtctcagccttccaagtcactgggaccacatgcccagctaatttttgtattttttggttttttttttcagagatagggtctcatcatgttgctcaggtgggtctccaactcctgagctcaagtgatccacccaccttggcctccccaaagtgctgggattaccagtgtgagccactgcgctcagcactttttgaattttagattttcagatttggggtgctcaatctgtacctttaacagcacttttgctggtctttcaaacacagactccccaagttcactttacactgggccctgcaaactaggtagccagtcccatgcccaaagtaggaaacgctccaggtcagctccccttaaactggtcctaaggctagtctcttcctcattagtttcttgggccttccacaggaaactctgcacccactctcacatatcatctttgttctggcacacagagaatctgggtctggggtccacataccagccccgcctgccccagcttggctgtgataagcgcaccttcaaggcttagaggcttttaggccctgacagcagtgggcgctgagctgtgacctctctctgcaggactgacagctattcatcagttggtgctcgctggaccagctgctgcccacccctgcatctttgcccatggcaggaggcaacactctcggaatgccagccttgcccagggcttttctcaaaggacacctcggggaggcagcccctcttctgcagcctgtctgcacctgacgcagggcctatttcagacagcccaggtcacccccagggcaatgagccccgagtgggccaggagtgggggatggtgttatttggggagggggcagacagccattggcagagccacctgagggtggtgtggcctatttaggagggactcacagcccacactatccctcaggggtcaggataggagcccttgtgagaactctgtctggagcctgggctctctcctgcatctttctacctcacccagggtgagacttgggactgggatgggatagggtgtggagaggccctctcgtatcttacttggtgccccactttgggctgagcaggggacagtgtctgatctatggcaggaagagaagagacaaggtagtgagtagggtacacactgcacaggcccgagcatttgggggcgctcaccacgcaggcatcagcatttgggggcacacaccacgcaggcatcagcatttgggggcgcacaccacgcaggcatcagcatttgggggcgcacaccacgcaggcatcagcatttgggggcgcacaccacgcaggcatcagcatttgggggcgcacaccacgcaggcatcagcatttgggggtgcacaccatgcaggcatcagcatttgggggtgcacaccacgcaggcatcagcttttgggggtacacactgtgcaggcacgaacactttgcctttttttcatgctggcaacagctggtgctgactctcagagcctgtggctgtgacaattatcaaaatgtttactatgtgtcactattaataatgtagaagccccgctagcctgccagtcagaaagagagagagtgatagccgaggggccaggctcccggaaggctcctgctcgctgcctgttcacccttgaccctgctgggcagcctggatgtagggagaggctgtgtcctgaatggtgccttcatctgctcttcttagccagcacccccagaaaggaacagaaccccttctcctcctgggtaccccccttcagcccttcagatatagggtctagatctgtccatccaagaagccttctggaagattctgtgctcccccacagcattgcactctcacttctgtgtgcagaagcgtggtggtcaggactcacgtctcgtcagcctccctgcaacgcccctctctgtgagctctttggggctgagacattcttccccgctagcttcctttacaaccctctaacgtggcaagtgccctcctgcctgccccagggcctttacacagcccgcctcctctcccaggacactcaccccctgcctctttgcataccaactcctatgcatcctttaggggtcagttgaaatgtcacctcctttgggaagccctactggaccgctcaactaggtcacagatcccctgttcaatattttcacagaatccttgccttatgggaccaatcactgtagtaatgaaagtttttaatcgaatgtctgtctctccctgtagtctgcatgctccctgacagcagaccgtggtttcttgcccactgctatcttcttagcatacagcagttaataaatatccatggatgaaggcatgaatgccaggaacaagccctgactcctgtagactctaacctcccatcttctctcccactcgggtgagcactttgggctgctgggggtctgctacgagggtggaattctcccttctggaacagtccctgcatctcgtgatgcatcccatctctattctaaggcatggccagctccccaccaaataaagagaaaggagggctctcaacaaccgcctctcacccactgagccactgcccccaaacctcaagaactaggatgaaaagttagaagggccaccctgtgcggtgtgccctggctgtgatgacagtccccggccctcaccctgttcacaaaccagcgaacacttgggcttgcatggacactgcctggagggaagatgcagggccaagagtgcttcaggctcagggtgagcacacgggtggtgggctgggggcagggagagtgccaggctgcctgcccccaggatcaaaggccctgagctccagatgaagggtccaggggctgaaattttatgcctggctctgccactgacttacagagtgagcttgggcagagggtggtagtgacttctgagcctcagtttcctcaactgtcaaatccaccagggatcagtgtcccattgacatgcagattttgacttccgatgataggaccctggccacggagcccacctggaatggtttccttagcagaggaaacttggggttgtgggatgtcggctcttggcaagacatcactcaaagctcacaaggccttctctagcagtacggacggagaggggagagcatgcctccagctccctgcccagtgggcacccaggcaggcaaaacacctcccagctgtgtcctgcacactggccaaccgagagagctgggcagttggcctggccgccgggacctcgcctgctctgcacaccttctcccagtgctaggatgaagtggctggcaggccctagcatggggctgggagtgagggtctcactgggctggccggtgctacaggggtgggaagctgccttggcggccccacctagcaccagcttttccaataaggttgttgctgtcggtagaaaagggctgggtgagggtcaccctctcagtgctttccagacctgagcgccctgatgcccgggtataggatgtctcccttctccccaaagagggaaacagtcagctccgagggcgggactgtgccacctccgccttgccctgctctccgactgtaggaggctttggagagagtcagcccctagcacgtacccagggagcaccttctgggaccagtgctggatcaaaggccctgagctccagatgaagagtccaggggctgaaattgtattcctggctctgccactgacttacagagtgagcttgggcagagggtgatagtgacttctgagcctgagtttcctcaactgtcaaatgggagggtcaggctccgcatcttaatggggtctcccagctgtgcttctcccccttctgcctgtgtccctgcagggttcccctgcctctcctgccaccacatccctggccctcgagtctctacaggagaagaggagtgattcagaacaggaagacgctcaggtcgaagcccgttgatttgttacaggtgacggatgctgatggccgttcatctgtggttgctgctgattagaaatcagtctccagtggaagattaaaggctgggggcagagtagggtccacacactgctcagggcttggtcctgctctctgccatggggaagtcagggggcagtgcccagcacacacaacagtgcccagcctcactgaggctgctcagacacccagcggggaaagtggtgctgatcctgttggggatgtgaggaattgaagctcagagaagttaagtaacttgcccagggccacacagctggaggcagagctgggatttgaacccagaactgtctcagaatgcactctgtttcccctatgccatgcgcttctcgtagtgggtggcagagtctagggcgatgagaagtctggagcctgtgcaaggccaggcttttctctgccatggagtggtgtgccacggataacacaggagctctttctgggcctcagttttactctctcttgtgagcaggaatcccccggagggggtgttaaaacatagactcctgagccttccccagatactctgttcgggttggtcctgagtaggtgctgcgggtctgtgggccacactctgaatagcacctactaactagcaagtctcttgggttccttttggcaaaaatcccccatctccatggccaggcggggaaatactggctaaaaccctgtggtgttcctgtcctcaccacccaccatcctccctcaggcctgactaccccctacactcagaagccacacacctttgagtccagggggagcccccaaccccacactgtgaatgcagctctctgtgtgagccaacagagggtggtagtgaccagaagggacttaggagccagcactgtgatttgaaaatgagcttttccacttcctgtgtgaccctgggaaagtaactagacccctctgagctccaatttccacgtctctaacataaagactggaaagacatacagaattgaatgtcattaaacggcacaccaagcgcatccatacatatgtgtgtcctaggaaatatatatataggatgtactcggaaagggacaagaaacggacagttggaacttcagtgggaagtgaagatcctttggggatgtatgcattcttactgcatgcttgtgttattcttccaaaaatgttctaccagcctcatgggctattgtagggctaatggaggtgatccctacaaagggttgtgcataaggcctggcatatagcaagcactggataaggtgttagctctcctcctcttcctccttctccccaccatgcctctcctgctggctagctctccctgccctcctgccattctcctggatggcactgcctccctccctcctgttgctctttatttatttatattctcttcaaaaggaaggggtgtgtgtggctggatcaattcatccatgtcgctcacttggctccacttccctcctccttccgcccctctccccctcgctgagaccaagagcgtaaattccttctggctattaattaaaagcagcctctcccttcgcgccagtgtactcgccataaattaatagcggtcttcttaatcaaatcttatctcctcctcgagccataaacatatggagctcaagttggtatctctgtgcacccagccgtgaaatttaatttctgatgcttcggtggactgcagggggtgggtgggtggtcttgtgttgggggccacccaaacttgagtcccagaaccagacccctggtcgaccagctgggttgactcaaccacctcccatgacgtctgcaggcaaagcatgtgtgactctttaagcctgaaggtccagcagtttcgttgcatgattataatcgttggcattctaaaggctttcagagattttatctcatccgattctcatgcaagctctatgaggaggaataggttgggaatatgagccccattttagagatggaaaaactaagtctaacatgttctttagagtcagatctgaatggaattcctcctctgctgctttctagctgccactctgaccctcagtttcctcatctgtccaaggggaaagagaatgcctcttgcagctttgaagtgcgaatgggattaactgtcatatgtaaagggctcggtatggtgcctggcctgtggctgctgcacagggtagagatattccactaagtgacctgcccaagactatccacccagctacaaatcggcagtctgggccataggcttcaactcaaattccatgcccttggaattccatctccaggctctagagcctgaggtccccaggctaggtcccctaggcaaaatcagctcagctgccccctccttctggcctgtcaaatgcccaccccaagtacatgtccataagccactggcccgaggtggagccaggagcctggacgggccagggcagagcctggacagaggacacaactgccagccttgctccagctgccaagtaactttgagccaataccaactggggcgccctctggcacgcctctgtccctgggtcactccagcatcaccaccctacttagcagctgacagtctccagcaatttccctttggccgcagggtggctcgggccatctctgcacgttatctgtgttactggggcgtgactcatgtcatcctggtgcaggctcattcataaatgagacgggactctgaggccacttctggagctgctttgcccattcagagccgagctccgcagcctctcctgactcttccagccccgggggacaatcaccttcctatctgagacccagcgctctggcaaacagccctctttgtgcccatcaaaccctcaggcccgcttctctggatctggctcattacatttccctgaactggcttctcctttcctaaccacacaggtgcttttaaagtcttctcattgctttgtgagtctgtttttgtttttctgtaaaatcttgaagtctgtttacaattcttcacaccctcagggaggcatctctctaagaaactccctgtcctgttatctgctcttggcatcccattagccactcacttcaccatctctaaagcccaccatgttcataagactctagtccagtggttttcaaagtgaggggaggagggagtcccaggaacagctgaaacagcagcacctggaagcttgtaagaaatgcaaattctggcctggcgcggtggctcacgcctgtaatcccagcactttgggaggccgagcctggtggatcacctggggtcaggagttcgagaccagcctgaccaacatggagagacccccccccctcccccgccatctctactaaaaatacaaacttagctgggcctggggctgcatgcctataatctcagctactcgggagggggaggcagaagaatcatttgaatccgggaggtggaggttgcggtgagccgagatcgcgcctttgcacaccagcctgggcaacaagggcgaaactccatctcaaaaaaaaaaaaaaaaaaaaaaaaagaaagaaatgcaaattctgggccttgtctcaggcctgatgaatcagaaattctgggtgtggagcttggcagtttgtgactgagcaagtatcccaggtgattctgatgcacagtgaagtttgagaaccagtgctctaggctgctggttctcatcagggccaactcaactttgccccccaggggacatctggaagcatttttggtcgtcacaactggcatctagtgggtagaggccagggatcctatgaaataccccgcagtgctcaggacagcctcctgcggtgctcaggacagcctcccctctaagaacaatctggcccaaagtgtcagtagtgcggagactgggaagtctcgctgtgcctagggccggggcggcacagttccagggccaatgcacaagcacagcagctctgggtgacaaccggacaggcgtggggcacactcctctacgtggcgcaggtgccatacgcacttcattcctgatggctcactttacagaaggcgccagatgcctgaagcacagagaagccactaatccgtgatctcacagctggtgagcaccagggcagggttagggccccagagcaagtgaagccagagccggggtcctccctgtgatgccacgtacttgaccttgcatggagagaggcttggttcttactaaatgatctgttcgagcaagaaagacaaactgcaggcatcacagtccctgactcactcagtctagtcagtggctactgtatgctcctccctaagccaattattctactgtgtgctggagtagtcccaggatgcaagaaattcacgctccagctcacagtgatgaatgcacgtgagtgcaggtgcacacacaaacacacaaccctgaagggcaaggagatgtctcttctagtccctcccaaggtgcagagttgtaggtgctcaaagcattcagaaaaatagaatgggaatgagggtgaccctgttggggagctgggtattgaggtgtggggcagatttgcagagctgggaaaagaggccggaaaaccacaggcaagggacgtggccttggagttggacagatgtggctctgaattctgctccaccacttccagcagcgtgaagcttggccaagctgcttactccacaagcctccatttcccaatctgcaaaatggggacattgctactggctccgcagccttaggcaggataaaaggggaagctcagacaggcactctgcgtcactctgtcctatgtcagcatcagctggccctgaccaaggataatgctgatctggtcaccacaggctggaacccaaagtggggtgtgaaatcggacaaggcagacaagagagcaataagcctcatccccaggcagcaggaggcaagccgcacatttggttttgagcagccccgcagagccactgcggattagcaggtgttacagaggtgctgagtgccattagcacctaattacgcctttgtccttgctgtaatcaggtgaacagagaagggactgaaaaggggagcgccttaaagagaaagcaagcagctgtcaggcaggaatctcttccaatgtgtccactcctctctagaatgtggcctccttcccacggccagagggcctgggccattcaggtggccagaaaggatacagccagttacagactcttacatgctgcctcttaaacccacacggaatcgaagtctgggctcatcaggaaacagggagccgatgagggcctttgagaagggggaggcaattgacgaaagaagacatttagcaagacgagaattggacggctgtctgcagggtggatggaaaggtacggctggaccagaggggtcagttcggaatctgttactgtaatccaggcatgtgctaatgcagaggagtaccaggaacacatgagacttgacaggacctggcaaccagcacctccttccccggcattcgcttcccctgtcggagatgatgctggaaagctcaaaggtcccacaagaagcacagcagcaacttgaagctgactttgctcgttgccaagacccgcaccacctgctgtgcaacaccattgctctgccccgtctggctctgggctgctccttcagaccctggcctaagtagtctttaacagggcacacctggggaaaatacaggttagtgactctaagtcttcaacacaccctgagaatgaccctgggtggcagacgcacctgattgtgtgttctgaggtggggaatctgggcatggccaacccggagagtcactccttgtctatgagaaacatccgagccctgggcccatccagaacatgggctgtgcatggaattgaggccctgagttttgggttaactgaaggttgccaggtagaggttgttaagggtagagtgttaagtggccatgctatgtaaactggtatgccctttccaaatggttgctgttttcctgcccagactgccaccaccggactgtaggaaggcggacatcttatccagctagctgtcattgaactatttatttgtttatgtttatttatttatttttgggacagagtttcgctcttgttgcccaggctggggtgcagttgcatgatctcggctcactgcaacctccacctcccaggttcaagtgattctcctgcctcagcctcctgagtagctgggactacaggcgcctgccactacacctggctaatttttgtacttttagtagagacagggtttcgccatgttggccaggctggtctcaaactcctgacctctggtgatccacctgccttggcctcccaaagtttggattacaggtgtgagccaccgcacccggtcttaactgtttctatatgtaaggcatttctcctgtccagacagctgccactggaccctcccctggatgtaagcccctaataaaaccctatgtctcctttgctggcgccgggtctcttcttcagcttctcgaacctggtgccttccctattgaggttaacagggtttcagcacaacacctgccctgagctctctgctcccccggccaccagcacactcttccgggacgccacagtggggttgccagatttagcaaaaacacaaacacaggatgttcggttacacttgaacttcccttcagacccaaggctgttagagttggggtttgcaacagtgcaaacctgtaggacgtgtagaatactctcgcaaattggggaatgctggtgctcaaagatgaagcaatgtttatctgaggtccaaatttacttgggtatcctgtctcttatctggcaccctatctacttggagatgcaggtttacaagaactaggacatggcatggcgaaaggtatgagaggacacaaggagacctggtccccatccagcaccccctactcatgcaggcacatgactgagctttgcggagatgcttatctgtggggtggggcaataccagagggcagccatcacgcggctgtcaggaagcctcctcatcttcaaagagcatcaagcactaaaacggtaagagtggccaggtctggagtgcagcggagactcgaggagagataaaaggctgccaagagcacacccagcctctctggggacgtggggtacgtgctatgaatgcaccttgcagtttctcacccacatgaggggggagttgatctctgcggtccccttcagcttaaaaacctcatgctgatcccaggcttccggacttcatctgtcaataacgatgaatgcagggaactgcagcctgtctaccagtagcccttgcaccacagaaaaaggaaggtaaatccacaactggaagaaagcatcatgggctgcaggccacagccatgcctccgtgggcctggcactgtacacttcttggaaagatctaggcctctcggcccccatcatgccgaaattagaggctggctccgtgtggctgcattgcacctgccagcagggttacacctgtatgatcagaaatgtgtaagagcagattttactggactaataaaaattaaaatgaccaaaatggagtcagaacccagccaaagagggagtgtgggagggaaagagtctccagctttttattttttaagcaggccaaccacatggaggtggggacgacttcttccccatgcccccggcagcacctccagccatctgtccccaccacctcctggcctggttagctggcttccagaaatgtgactgtctggagtctaaccggggcacaccaggagctgtcaccctgagtcaagcctggggcatgaagacaggaagagagggccggggaagcgcgaggacagggaccttggtggctggctgaggatgctcagatgacgggaagacggaacagtcaggcacaccctggcggctccccatttccggaaggaggacaggaacggaggtccagggagagcctattgtaaccaccgtgcgtgacaccaagagctttggggaatctacggaatcaaagagtcacagacacatggcctggccacatgcccgtctcccaagcatatttcagggtttaacctcagctcaccccggtaatgctgtgtttgcagcgcatgggggtgtccgtagctcgccggtgtcacaggatcaccccagagtggtgtgggacgtacacttggagttcagccggtccagccagctcattccccattcgaggcccagggagggttgggtgggggggattgtttctaagcttaccgcgcaaatgccgtccctcctcctcctccccaccccagctcctgctgcaggtcttccctcgacaggctgggtaccccaccccaccctctgcctacgtctgtgccactggggggctgtgttcagtgtggatgtggggctctgtggtccttctgtcatccctggatccagagttactcctgggggcccagacacctctgtaattcaagttgctgggctactgtgaggcccaaaacgtttgtggggagcagagaatgaaggagcctcagcacccactccctatcctggccacaagagcatccttcctcctcattgtgcaggaaacccccacccaaaggaacagagatggggtgtggggggcttcccccagagaccatgaggcatgcgctctgggccctggggtaacctggacaacatttgcctctaagggaccaggagtggcccaggacaatagacccagaggcagaacacctagcttggaagggccagagccccccagggaaggagcagatggtacctcaagctgaaccccttctctgcagtgcccccccaaagtgtgccactcacatgtttactgatcagatttggggtttctgacatgcagtaatcggatcacggaaggtgttaactggattaggcagaaggcttccaggagacaccagctgaaagtggctattaaataacacaggggcctgggcggcagggctgaggggaccctgcttcctcagccctcttcttcttttgtccctggctcctcacttaccctccttggccatatctcactgtccgtccttctttgagcactggccatgtggccgagtctgtgttggacaatttggttgcattatctcctttaatccccacagggaatttacaaggtaggtttcaacctccccatgtaacagaagggaaaacagaggcttggaggttaagaaaatggccccacaacccacagcaataaatatgtctggaattccaatccagctttatctaatatcgtttccaactcaaaaactgtttccccaaacctggtcatgtcaggcctcccaacgtctgggagccagcaggtggttcactctggccagcctctgaggctgagtgttggacagcgggaaggcggcattgatggggattcgtgggctgtaggggaaggtcagccactggacagctccctcgacccttgaccccctcaggctggggtgctggccttcccccgggcagcagctgagggcctgagtctcatgtcctcagactgctccagatcagatggtctcaagcccttctcctgagtataaagatgcccttccctcccccagtgctgctccctaagaccctagaggcaagaacttggttgctcccctggaaagtgttggtggtggggatgaggagatgggaagagagggagggggagagagagagagagaatatattagatatcacagaagcaagctggagtcccagcaatgtgcttgctcctgcaagactccctgcctgcctcatgatgggacaatgaacacacacacacacaacacatacaaatacacacagaacacacagaaatacacccatagcacacatatgcacacatacatgtaatacatagcacacatatgcacacaaatacatgcacaaatacaaatacatgcagcacagatgcacacaaatacacttagcacatatgcacacacacaaatatacagcacatatccacacacaaatacacacagcacacagacacacatacaaatgcacacatagcacacacatgcacacatgcaaatacacacagcacatacatagcacacacctgcacatatacaaatacacacagcacacacctgcacacagcacacgtgcacacacacatacaacaggcctcactacctgcctgcttcactcccccagcccttgtcaccctctgctctgtggatcacctcctcaatcagaacgccatcaccacgagaaaagacttcggcctgtttctgttgtttctacctctgtacccacagctcctagcacggtgcctgaaataagtgggcattgggtgggcacttgctgaataagtgaagccatgagccacagaaggggtgtcagtgagaattcgagtgtgggtgaaggtgaggaggaggaggaggaggagggaggaaagggaggtctgagagatggggagaggcaggcctgggggagagcgtggccctgtgtcggagagacagagaaatagagtcggggtggccacaggtaatgaatgccgtttgtggtgagactctcttgccctatggctccagattgagggggtgtcccaaggatgtctgggcacaatattggtgtgtgccagggcctgggaaggaggcccttgtgcttccaagagatcccacacagcaccagcctcccacacagccatgagtctgggccctggaggggacccagcctcgggtcatcagaggaaacgctgtctcctcctcgcttggactggccagtggcacaggctccctcctagggaggtatggagtcaccagaaaggcagcctggggcccaggccaggcccagatggccccagctgttcaccacagccccagggcaggcaggaagctggggtgcggggagtagccgctgacccactgggaaccagcatgcagtttggaggggggcctggtgggggcagtgtcagttcaaggctggcatccactcctcaccggcaggccctggcaagggcctatcctccctagaaggcttggaggcagccaggggggctgagaggggccaggggagctgggaggacaggctccatcctgtggggctccctgctgcctagaagcagccatcaagcagcccgagagtgtggcagacatggcttaggcggcctgatggagaagcccttgacacataggattgcagaagtcagaggtcttggccttagggggatacagtgaggcctcggcactcccagtcttatgtcccaggcagacggccctcacctaccccctgtgcctgccccaacacgtttgggctgtcctgggcagggatgcacacacagggagtcccagctgcaggtggtggtagcctggagacctgggtcctgggcagctttgggacagagccactgggcaatctggggcggcaggggtagtggagagggacccgcagggtgagtggggaggcagtggcgacctctatgagagaaggcagcctggcatatggggcagtgatcagggcaaggtgtcaacacacctgggtccccactccaactggggacctggaggaagcctcctcccctccctggagaggggcatgacacggtatgaacattggccggagctccagtcaacctctgcgaccctcagtttcctcatctgcataatgggtttgtgtgaatgtacgaaaactcctatcagtgcattttacttctcaatatatttctgcatatacatattctgcattctctctggcctccctgtcccagcgtcccagcctctgaaagggggcgctggctcatgatgtatctgtttcccgcagtgacatgtccccggaacccacagccaacccccttcccagtggtctctgatgttccccccacccccagaagggagatgaggaggagcagaaacaggggacacaggacagggtggctggttccagcctccccgaccctcccagctccactctgatcttgtggcctctccagctctcatcctccctccatggcctccagatgacaagtccctggggatagctccctgccatggctggcggtgtctgagcaaaagagggagatgaagctggcttggaatgggaggtgctaaccttgtcttcggagttgcccgcttgctccctccacccctagtccaggatgcgcaggcagaaccccggccatttccattctggggactctggtcgggagtccggcgccctaggaatcgtctcctcacttcagtctgaacctgctccatgcccagggaccgggccagtgcacctggactcacctcatctgaatcatccctgtgggagtgcctgtcaagagccaagatgttcccaagctcatctgtctttctcttgtcctttaacacgtattctcctgatgggttttggatattttcattctccttcacctcaccggggccttgaagggtggagactctccctggtgctggctacccagcaccccactactgacacaagacggggagctgccctgggtggaagatgagaggatgcaatcagatttctggaagctgggcacaagaaacctgtgaccaagtctcagccctgccaggtatgaccctctgaccataggcaaattatttaacttctgtgatctcagttctataaagcaggggcctctcctgtgatactttgcttatagaactctgcgatgtggacgtatctgtctggaatagttcctgggctcgtgggagacacacaatcaacagaactatggacattaccgtcctgtctctcagggctcatggaacgacaggcttctgccgatcctgcccccagcccaccgctatccttataaatatgtattcataggagttttcactgtgtgcttctggactattttcttttcttttttttttttttgagacagagtctcgctctgtcgcccaggctggagtgcagtggcacgatctcagctcactgcaagctccgcctcccgggttcacgccattctcctgcctcagcctcccaagtagctgagactacaggcacccgccaccacgcccgggtaattttttgtatttttagtagagatggggtttcactgtgtcagccaggatggtttcgatctcctgacctcgtgatccgcccacctcagcctcccaaagtgctgggattacaggcctgagccaccgcgcctggcctatttcatttttatgatacccctacaaggtgaaatattccctttctacttctacagatgggaagagtgacgctcagagggtttgggtcactattctgaggttacatagccagctggtgtccgagttgttctcaggtgccccaaacctagaacttttccatcccatctccccagggggagggtgctaggatcccgtgccccaaccccagttaacagccaccctcccaccattcaccactgccatgactttggagccatctaagcatatacaggtgacaggagtaggccggacccacaggcagtttgctgggtttgggagactcggtgtggggcgtgagttcctagacgctaaccccctgtcctcctggctcaggtcgctgggtcattggccgacggcacctgtgcgggctcatgcagggcagctcagatggcacaggcctccctgacagccagctggccgaggcagccccatgcatcagccagttttgtttattctccagccttgtttatgactcgataaaatccataacacggacagtgcctgtctcccctggcttcccctctgcccggctctcgttccctggggatgcagctctgctctttatagaaaccacctgctaaactaggcccacctgaaacccatcactgtcagtaaatgaccctccaggagaggaagctgcccagtaagtgtgaggcagcgggcacgacgtggatcgctggcctttttctttacagaggttaaaaatagtcccaccgggagcagcccatccccctccagggaccacccctagctgtatacctatgtcccctccagcaggggaaggtgggagaggcactggacaggtgctgagaagacgtggtctggccagggcctggcacctgtgagctcgaaggcctcgtgtaagtcacagcacctctcctgctttccgtttccatttacacaataaaatgaatggatcaggcaccaagcgccggcttgcttcgatttttcttcaagtagtggaaccctttctttaagtaaaattttagacagatccccaatagatgagagtgctgaagaaaacggacttttccgggtaaggagcgagtggaaaatgtagcatccccctagaaagagttaccccttttcttgtttttccaactgaagtctccgagcttccagaaggctgaggctggatatttttcattgttgtgtcctgtgcaatgggcctggcccactgatgtgtctcttgtagtgcttagtacattcgtacagaaggaggaaggtaggtaggtaggagggagtgagaaaagaaaggagagaaggtgctgggcacggtggctcacgcctgtaatcccagcactttgggaggccgaagggggtggatcacttgaggtcaggagttcaagaccagcctggccaacatggcgaaaccccatctctaccaaaaatacaaaaattagcctggcgtggtggtgggcacctgtaatcccagttactcctcaggaggctgaggcaggagaatcacttgaacccaggaggcggaggctgcagtgagctgagatagcggcactgcactccagcctggatgacagtgaggttccatctcaaaaaaaaaaattaaattaaataaataaaaataaaggggagagggaaaagaggaggagagagggagcaaggaaggagggaggaaagggggaagaggaaaggatgaagaaggagggagggaggggaacacacattaagccagtttcttttttctctcacttcaagcatagctcaaaatccattccaccaccctaagccattcctctccatcctgagactcaggctaaaagcagaggctgtgccacagtccttgccaggcccaacctgttccccacttgcagggagctcagccagtggtctctgacacaggggcccaggctcctcagctgtgatggggggtccttcagtgaaggtaggtgccaagtcctgtctgccaacacagtcactctgtctcacacacctacggttatttgtcaaagtatgtgactgctgttgtgattaatacgctagacgtccatttaaaagtgatactgaacccgtagcagcccctcgtcactatgttttctcaaacagtggttgctaaataaacaaccacaagcacatggagatccctgactttcctggggaaaggggtccttgtgctggacaggaggggacctggtcccaggtggcctgagcccggggcagaccctcacccttccctggccattgcagctcccgccacttcctcggtcccatccagcagcactgggtttccctccaggagcccatggatggcagccgtgtgctgggccagaggccacatctggaattcattctcttcattaaattggtggctgtttcccaagctctggctctcttgatcctcccaaagccctgttcgtgctgctaacaagggcagtaatttgttcattaaaaacgggacgccttcccaacaggcctccctggcttctgcctcccctgggggaggcggggtgtggagagggcgacagcaatccttggtcccaggatcagagctgtcccacctagggggacacccagggcttctctggggcagagcctcacctgctctggtcactcagcccctagctccccaagtgactccgatggtgccagcagacagtgtggggagaggccgacaagagcccctgccagctcctctcctgctctgcgacagggtgttgtggccatccagtcgatgcggacaacttgatctggcatcaagtccctgtgcaaaccacagcccatcaagaggcatttattgttgtgaaaacaaacagtcccctccccagtgcctggtccatcctatctccactccccaccggataccctttccctgtccttggagcagctcagacggactaatccagagctgctcactcctctgcattccaatctctgctccggctggtctgggcccaccagggaacaggaggcaggataccagagtctggggggcaggactctgtgcacagaaacccacccaagagaggcctcagggcctttggtgcctttatgaatgatcttttcattttattatttaaaaaaaaatttttttttttttttgagatggcatctcactctgttgcccgggctggagtgcagtggcatgatctcagctcactgcaacctccgcctcccaggttcaaacaattctcctgtctcagcctcccgagtagctgggaatacaggcatgcaccaccacgcccagctaatttttgtatttttagtaaagacggggtttcaccatattggccaggctggtctcgaactcctgacctcaggtgatccacccgcctcggcctcccaaagtgctgggattacaggtgtgagccaccgcgcctggccttacgaatgatctaagtttaagcacatggaccctttgaggtggcatgctgggtggaatagtgtccccccaaattcatgtccacccagaacctcacgatgtggcctaatttggaaagaaggttgttgcatatgttctgaattacggtgaactctagtccaatatgctgtcctgtgaagagggaaatttagacacaggtacacgcacagagaaaagacgggatgaagcacagagacatagggatagggccgagggacaacggaggcagagactggagtgaggcatctctcggctaaggcatgtggagaatcaccagtagcgcccagagctaggagacggtcccgggacaagctctccttggagtctccagaaggaaccaaccctgccgacgacaccttgattttggacatccagactccagaactgtttttttttttcttttttgagacagagtcctgctttttcgcccaggctggagtgcagtggcgccattttggctcgttgcagcctccgcctcctgggttcaagtgattctcctgcctcaggctcccgagtagctgggattacaggcacccagcaccatgcccggctaatttttgtatctttagtagagatgggattttgccatgttggccaggctggtctcgaactcctcacctcaggtgatccgcctgccttggcctcccaaagtgctgggattacaggcgtgagccgccgcgcccagcccagaactgtgttttaaacaacccagtttgtagtgcttcgttgcggcagccacaggaaaccaatacaggtaggtaggtgagttggccacgtttgggaaactgaggcccagaagttggagtgcttcactccaaggtcacaaaaacaaggcagtgacacaactgaggctggagttgagatccccactcccactccatgaatcctctgtgaggcccagagactgagaaggagcccaggcctgcatgcctcagccactttgttaggaagaaagcgagggctgcgaggcctgggcagagcaaggacggggagcctcttcctccatggcatcctcagctgcacacacagacctgtaacagggccttggcaacagtgcaccatctctgactcagtatccaggattctctcattcttagcagagtgccggctgcctggcagacactaataaatgaatacatggatggaagaaaaaaaaagtctaagttcttttttttttttttaatgaagttcctttgcagaatcctccttttttgatgccagatagaaataaagttggatgacatttttcccattctcagtctcttaaatcccaagaaacccacacaaggaaatctatgttcgggtctgggcactgtccttaagtgagaatgttgatttaaagcagggtttctcaaccctggcgctattttgttgttgttgttgttgttgagatggagtctcactgtgtcactcaggctggagtgcagtggcgtgatctcggctcactgcaagctccacctcccaggtccaagtgattgtcgtgcctcagcttcccaagtagctgaaattacagggcctgccaccacgcctggctaatttttgtattttagtaaagacagggttttaccatattgatcaggctggtctcaaactcctgacctcaagtgatccacccacctcagcctcccaaagtgttgggattataggcatgagccactgtgcccagccaaccttgacactattgacagcttgggtgggatcattctttggtggaggatgacctgagacactcaccaccctcccaggttgtgacaaccaaaagtgtctgcagacagtgtcacatgtcccctggagggcaatgtcattccctgctgagaccaccttgtgctggccataggggtgcacaggtgaagagtctccaggtcccggcctcagagacctccctacttggtggagagtgaggggttagcagatcagtgtatctatcctggaagtgaccattgctgcctggccatgcgggcagaggctggccccctgcgctagagagagacttctgggccggactgagaggattcatactgaccgccaatgtcccttcccctagaagattcaaaaatgctctgggcatctatcacactgataagttggagagacgactcttttctcctctgaaatgtagctagcctgggtcccaaggtgatgcacacccaggggagcctaggatgctacaccaggcaggacgggcttcccagtgtgcagggagcttgggtccctgtagctcccactctcaactcagaatctataaacatggcagcagccacttacgcttcccagttctgtgccaggaacttttcagtgatccagttatagcttctccttaaagctacgctactagagaagacatattagccttgctttaaagacgaaaccaaggcttagagaggttaagaaagttgccaggggtcacacagcttgtgggtggcaaagctgggccttcaacctaggcctgtctggctccttctacaacacagatcctggcacacctggaaccttgtaaggatgtccccaacttgggacacttcctgggatcagaggtcagcggccacaatgagtgtcctcttagcagagccctggagaagaggtgtcataaagaggaggatggggagagagggggaagcgcagaacccaccaacgtcagctggcaggaggacaatgcctgtctcagaacccagggccaaatgggcagcagatcccctggagattgccacgcggagggaacgcccgcgccgggcagcgccagcgtcagccttcctggccaggagagtgtttatttccagggcgaggctaggagtggtttccaggtgggggtccgtggaaataacgtgctcacacacactctcttgagcgaacagagccccattcagcctgtccagaggagcggacccgcaaagctcatggcctgcattccgggcagggtggaaaaggcgattcagagaggaacgcccagtcagagccagctcctccaccacccccttgtccttcgcatcatctcccaggaggacaaaacaaactcagggcacagggaagggacctggcactcgggatacccctggtttgccagggaagtcaccagcccacaaaacacggcattgcaaccacacatgacactttacatccccaaaggccggtgggcagctggcttaaaggaacaaacagttgctctgggatctccactgccacctcctgttccttgccctgctgagccctgggactagagaggcaggatgacagccaggaggctgctgcaacagtccaggagaccttggtgacccagcatgaggagtgcggggctgaggggtgtggagagagaaaggatagcattagggtttcaggcctaagctagtgtgccaagtgggcctcacaacaggcatgtgggtatagaaatgaggaggctcagcttgggcggtggggctaagggaaggactggaagaccacgccgaggtccaggaggtctggagctcatcacagccattgcagcaggcgtggtgggcgaggatgccatcagcacagtgatggcaactaaagccacgtgggagggggttggggaacactggcacatatgcacatttagtggaccactgcgggagaggaagcccccagtggtcctggaaggagagttagagaggcaaccccagaaggctgcagtgttcctgaaagctgagaagaaaggagaggccaccactgggcaaggccaactatgggcaagggggcaaggccgtaagagggtccctctggtttaccaacatggagatcacaggcaactttgaccttgaagcttcgaaaaagggatgaggcctggggtgatgtgggcaggcaatgaggtgggggaaagagtgacggccccttcaagaggttgagtgaaggaaagatgtagggaagaggccggagcagtcaagagaaattgctaaggtttgagggacgtagcaggtcaggctgaggggaaagacttggcagagagagaggatggaggtccaggtgagggggcgggatccaggctcaggtggaggtccggccttgaccacaggaaatgggtgtggagaagaaagcacagggggtggaaaaagtcttgctagaaggaaggctggaatcccggagattctcacttgaggggttcttcatgtcttggagaaggcagttggggccttcagctaaggagaggagggagtggagagggtgggagagatggtaataatgacccataactcctgtgtcagattttcctgctctcctttcctgagtcagcccagcatcacctcctccaggaaggcctccttgttacctaatcctggatgagttccctgtcactcctccaaattcgggcaataccctggtgtgcctccatgcactgaccttggcaccgggatgacctgtttgggttcctcactaactatgagcatgtgccaagagatcggatgcacgtatacaacaccagccctttgtggcacgctcagcacgtaataagcgctcaaaatgcttgctgagtgactggcagatcggtagtcccttctctggactcagcctcctgctcttcaccaagcccgggaaagctgacaccccatttccctgactgcccagcaagaccacagcaaactgtagagtttggttttttccttcctgtgttttaaggaaaataagaaaaaaaaaaccccactcataccaaacaaacaaaatgagatggccttgttgacgtgctgatgggatctcactagcagagatggggctgtgttggttttcttttgcaaagattctatttattttgtagggtgcttggaggggcacaccatgcttgttgcttattattactttttgcttcacatcttgactagcacaatggactcatgatgaaaagaggctgacgttctcaggggcagcagcaggagcccagaagctggtgagaggcagctccctagggaagctgggctgggcaggagctccctggggaagctgggtggggcagggcccccctcccggaaagatggatggggcaggggctctgggtggtctgctgagcccctcctctgagggggggcagggcaggtgcttatgggtgctggggctggtgagtaaatgctggaaggggctttcaggaggtaagaaaacaacatcagctgccacctcctcagagcctggtatgggccgggtcctctcctattttacccgcaccatctgtaacccttacgacagccacgaaggcgggtttcaccgtttctactccacagatgaggctcaatgagttgtcataaatcgacaaacgtgctgtggctggtgaatggtgaaattaggttcaaacccaggtttggttccctgcagagcctgttttcttttggaaagtcacgatcgactctatccatggagaaaaagccactatccaccccatccacgcagaatccagattttcagttccgagaatggagaggggaagggaacaggctctattagtcacggaaacatattctccattctgggagtggtgacatagtgggtgagaaggggtgcagatcaggcggagggaaagcttcccatggcatgctgagtggagcagctcagtcaatgactgaaccagaagggtggttttccaggcttccaagatggaaaagcattggaatggcccaagagccaatgcttcttgagggtctccaatattcaagctagaccatgaggctggacaggcaagggagacagtcccttcctccctcattcattcctacccctttcatgagtggcctctttgtcccatgctccctgggagaaatgtgtcctcaagaagaggcaactactgattcaagtgccaaataagtggtgtggacaacaagtggtcaagaggacttcacaggatcctccagatctctaaggaggaagagaggagttgtcctcaccaccacagccttgctgagaagaggccctagcaggcagctgtagaaaagcacagctgagacgtccactctgatcaaccagtgcgattggcacatatcttagctgggacctggcctgagagcagggagaggcccacacgcactcatttcttcattcaactgtgtgtgtgtgttcagcacctgtcatgtaccaggccctcatccgggcatttgggatctaccgggggacccttaagacaaagattgctgcccctggggagctcatgaaaaaaagcaaaacgctgagccagggaaggggtctcgggtgggagagcaggtgtcaggagtaggctacggtgttcagtttgggaggtgggccagaccccactgaggaggtgacactgagccaaggagtcacctggggtgcagcattgagggcagccagatctgcacaccccaaggttttccagaaggggttgcagggcaggcttgggagacagaacagaggccacacggctggaaagcaacagagagtcggatctcggggacctcctaagcttctgtagaaaaggcttttactctgagggttttacgctgcaggcttttgagcgaaggacacatgctctgacttctgtgtgctttttttttttttggttgttgttaatattttatttcagaacagcttcagatgacagtccagttataaagatagaacaaagagtgtccacacaccccatcacccagttgccctttttgttaacatcttgcacactacggtacatttgtcacaaccaaggaaagaatgtgggtccatgaccaccaactacaccccacagtacacttggacttccctcgtctttccctaatgtccctttctgttcccggatcccatccagaatcccacattacgtttcaccgtcacttctccttgggccccttgggactgtgacagtttctcagatgtgcctggtgttggacgacctcaacagttttgaggggtgctggtcgggtcctttgtagactgtccctccctttatttttctctgatgtgtttctcatggttagactgagcttgtgggttttggggaggacgatcacggaggtaaagggcccttctcatcccatcgtgtcagggtgcctgctggcaacatgcctcgtcgctgactatgttaaccttgatcacctggggagacagggtttgctaccagcattctccactgcaaagttacttttaaaatttccttttattttgagagggagttttgcccttgtcacccaggctggagtgcaatggcgcgatctcggctcactgcaacctccacctcccgagttcaagcgattctcctgcctcagcctcccgagtagctgggattacaggcacccaccaccacgcccagataatttttttatttttagtagagatggggttttaccatgttggccaggttggtcttgaactcctgacctcaggtgatccacctgccttggcctcccaaagtgctgggattataggtgtgagccactgtgccaggcctaaaatttccctttttgtatggtactctcaggaagcagctgcactaacagcagcccacactcaagggaagggagatcatgtctatttttaaaggatcaccgtggctactgtctattgtgaggaggtgactgcagtggctcaggacaaagatgatggtggctggcaccgtgtcgcagcggagaaggatgatgagaagcaactgaactctacatatacgaatcaaatatcttccgttaatcagattcttctattggcttagatgtggggtgtaagagaaagagtcaagggttagccttgaggtttgggctgcagatcactgcatcttggcattgacctcagtaaagcctgggaaggccgctggaggaaagcctttttggggaagatcaggagtttgcaagaccttgtgtgtgttcagttgggatgacttggtcatcaaagtgaatgcagtgttggagagataagcctggagtgtgagagatgggtctgggctggagggaatacacatgggtatcgcaggcagaggttggatgagatcaccaaggggtgggtactcatggaaaggaggagagagcccagaactgagtccagaacgccctgacatcagaggctggaccaggaggaggagccagcaagaaaggcaccaaactgagagccagccaagagaagaccacgatggacctagtcgcagggctgagaaccagccccagcagagcagcttcagtggaagcccgactgggtttaagacagaaagggaagacaggaattagagacaggggcattagcaactttttcatgacattttgctgcaaagggagcaaagacatgcagtggaagctgacagggaaaacggctcaagagaaggtttgttttttcaagatgggagaaatcacaaagcatttctctgctaatgggaatgactttcaagggaggtaatgggtaccctcttacctacgtgcagtttacaagagttctccagggtctctccaaatcccaaaggagccaaagcacaggagggagggagggaactgctggggccaaagtgggaaagagaagttgcatgagaacctccagaaaacctcgagagcccccagggcccaaggagacagagtccctgctggccatgtccctcccattccagcaatcaacaggcagctgtcaggagacaaaaacagctcactggagcaagggctgggactggtagtaggtgcggagctcagccaggcagctgcacgggaaacaggtgtcctgctgaacaagatggaagcagggtcccccacaaatgcttgtgcagcccatcagccccacggagacatggggaagacaccccgtctttctcctccacgtccctggggagatgacactggtctcggggagacactaaaagcctaggatgctttggactcattgttctccagggatccccagtcagaggggctgaagctccctgaaagtataccctaaaagttgtgtgcccatgcacaggcatgtgactggggaggaaacccgtaggtttcatcagctcttcgaaggggactatatcctcaggagagatgcggaggcccagccagtcacttagggcaccccgaaatgcaccttttgccctgctccaagctcaaaagctgcttgccccatcccagacactgcagaaagggggaaaaaaatcaatcaactgaccattttgttctcagcctgaattttggcccagcacgcattccaagtggctgcaaatcccagtgacagcatgcatgacgcttggtatctgggtcactcactggggatctgactcacaggactgcttcactgcagccacaagacggccaggagagcccatggcattgctaatttcccccacagtagccacgagggaggcggggagtgagtatgtgtgcatgtttatgtgtgcaactggtgtttctgtgtgtgcatgtgttttctgtgtgtaaggcatgtgtgtaatgtgtgtctgtgtgtgttaggtgtgcccaggaaggatggagagggtgtgtgagcatatgtatctatatatgtgtgttcatgtatatatctatgcatttggtatgtgtacaagtggaggagtgtatgtgtggtgtgcgtgtgcgtgtgtgtgtgtgtgtgtgtatgagagacagagagatggagggtcaggcaggagtatggagaccaagagaacatgggggcctgtgccccccacctcccagttctcagaatgaacacaaggatctgtcagaaatgttatagaatgttctgaaggatgtgaagtcagctacaggtcttaatactgtattctctgcacagtctgaaattgcattttgctagaaatccaagtcatcgtgccctaggtcgtgctgcgattttgcaagagaccaggggctccgaggggttgtggtgccacgcaggctcacacagctctgagggtcaaagacttctggttctctcccaggagggggatttagaatctcactttctctccttttatcccactctctctctctctgcccccactgctgatggacaaagacccctcacccaagttcagcctctggctctgtcctctcctttcctggcactttctacagagaaccatgatgaagccagcgtcctctctctggcagggtcagggactgctctgaccagtgtggagcacgccccagggccactcagaggcctccaggaggccaggctatggcatagcaaggctggggcccgcctctgtggcccctccttgctggacgcccaagtccccctgggagaggtgccctggggggaccccaacaccttggctgggtgtgtgcttccctagttcccctgtggcctctgctcacatggtaagtggaatgagcacggcctcatggaggcctgagtttgagcctgtgacctgcagaggctttcccagcctcagtttccccaccttccctcatggccagtcatgctgcttcccagcaagttagggtgcagtgagagggtcccttgcccccaccccagctctgtaaggcctacccactccacgctcctcctattgggacccacgtccttgccagctttggagcaggcagtccagcccagcttctgcccggcccctgcccctgcagccaagctggagggagtcgccaccagagcccagggtcagatgaaagtatctcccggctctgggcttggacagaaactgatgcccaactctgcgtggggaaggggagaagcaggaccccaacgtgtgctgatggtcacagagactgtaagtaccacagacactttccctgtctcaggagggagcccacattacccatcagccgccagggaagtctccccacagtacagttgtgaattaaacatgtggcctaatgagttgattttattagtttgcaaacgcattgagaactcgttatgaaaataaacagcaattcctttcacccccgctgcagcctcttcaagcgaggaaagataaatgcaagtacaccacagtggtggcccagctgcacccgggctgcaggccggccccccacggtcccccaccctcacggggtccctgtgacccagctgcacctgggctgcaggctggccccgcatggtcccctaccctcatcgggtcactgtgacccagctgcacctgggctgcaggctggccccgcacagtccccaccctcaccgggtccctgtggcccagctgcacctaggctgcaggctggcctcccaaggtcccctaccctcactgggtccttgtggccctgccggggtgagggtagaagaggaggccaagggaagggagttctgcagccgacaagcccagggtggcagcctgagggtcccggcttccccattctgaccccttcagaacttgggggcggtggcaaaatgagaagcccagagagccaaataataataataatagtaacagtaggccaggcgaggtggctcacacctgtaatcccagcattttgggaagcccaggcgggcagatcacaaggtcaagactttgagacaagcctgaccaacatggtgaaaccccgtctctactaaaaatacaaaaattagctgtacctggtggtgcgcacctgtagtcccagctactcaggaggctgaggcaggacaatctcttgaacccaggaggcagaagttgcagtgagccaagatcgcgccattgcactccagcctgggtgacagagcgagactccgtctcaaataataataataataataatagtaatggtaataatagcagcctaccagatgtttagtatacaccaggctctgtgcgacatgctgtctgatctgccaccaaccctgtggggtgggaaacacggtcccattttatagatgaacaaacacaccaaggtcctgctcaagttgatgcgggaggaatgaggagcacaaagcggcacgagagattttcatttcaggagactttctcctgcagcgctaagtgaggcccgggttagagacagcaagactagttttccctgaaaaagatctccataatcctgtggctgggcagggggcaggaagatggacaagctgacctttggaggagccaaggggccctccacgactccaagccccgtctccctggagacgccaatgagcagccggctcacctcgctccctccccctctgctctccccacccccgccctccaggtccccctggccccaggcccctggagagagatggttccaggctggcggaattagccgtgaagccagcaggacaggcaccgtattgtcacgctctgccatccgtgctctctttggaaaggatgttctaatcccatttcatccgctttccatggctgtcagctgtttgcaggcatttgggaggcaggtttctgaaatcggagccactgtgcggccccacccccacccccacccccagccccctccccctacatatgctcatccatcagtcttgctggccggacccctttgttggccggccaacccccatccagtggcacgtagggcctcacgcccctcccagctgccccacctcttctattttgggtccacagcaggacaggcctgggatgcctcagccaagccccctgcgatgaggagggggacagggaagggggagccgtggagaggggcctctcagattccacagggaaggaattagccaagtgtcagctactttctgcaaatgaagagagagagaaggaggacctttgagcagtcaaaggaccagtgctccttaattcaatttatcttccacagtgcagccagagagatctagctattaaaacaaaaacaaaagaaaacaccactgctcctcacccctttggagtacgagatctggacaacagagtccagttttcccagactggcccactgggcctccctgccggcccctgcccttccccagccctcgctccctccccctcccctcccactgctgtacttcatactcagctgcttttcatttcccaagcatgccagggcccttgcagcctctaggcctttgccctggctgctcactcacttagcctggaaagtacccccaccttctgtggcaggcctggttcttgcctcgctttacagttaagtgcaggaaggggtctcgctcttccagaaagcttctcgaacccgaggatggaccacgtttcctgccctgcctcggtttcctaaaggacttgatgacacctctttcttagcccttgatttaaacatcatattggatttacctgcttatactcgtttccccctagatgactgtgagtcaggctagactggaggttggggaaacatgtcctgggcatgtttgaaagacactttgtatgttgggtacacagcgacacaaagatgggaacaaaagacactgggggacaaggattgaaaagggggagggagggaggggcataaggattgaaaaggcggagggagggaggagcacaaggattgaaaagggggagggagggggacaaagattgaaaagggggagggagggggacaaagtttgaaaagggggagggagggaggggcacaaggattgaaaagggggagggagggagggggacaaggattgaaaagggggagggagggagggggacaaggattgaaaaggggaaaggagggaggggcataaggattgaaaaggcggagggagggagggggacaaggattgaaaaactacctatcaggtactaggttccctttttgggtgacagcatggttagaagcgcaaacctcagcatcacacaatatatccaggtaacaaacccgcatgtgtgtcccctgaatagaagataaaaaaaaaaaaaaaaagaaagtttgtaaaggctgctcctaaactgatgtttgaatcgtgcctgacacagaagaaagtgctcagtaagtgtcagccacctctaggttattatttttctcattgtccttgtttttatttttcaactctttgaaccgtgcctgacacacaatgagtacatacttgatgttacaactgttgacttcagagtcttagatagatctagcaagaagataacctcaaacatcattgactttaacgttctgctgtcattgatgatgcatttgaggccccagaagtaaagtaagttgtcagaggcccctgaattggccactagcagagctgagtctagaactgggcctcctgatgtcccaacgaagtatgagtctctgcccggatgccctcctcaccataagccctagtcccagtggagctatatgctcctgagctgcaaagcaagtctctttctaggtttctctgcagagtccaggtctttgcataacacttagagaacatcagggataagacaggtccagtgttctgttcggctcaccaaaaagaagggagacacagaccttctccccaagccccgtccctccctccatccccagtcctgttcctgtccaccacacgtgaccccagggtctgatggtggttgcggtggaagttgttctggaataaaactctcagctaggtgatgcccagggtgaggatgtgggaagacagagtgatgcacaagctggtccgacagcccactggaggccacgtttttaaaccagagtcatgtgaaataagcaacacacacacacaagtatacatgcgcacaaatatatacacacatacataaacatatacacaaatacacatacacacaataacatacaacacatacacacaaccacatgtgcattcacacatacatatatgtacacacagtcacatacatatatacacaaatacacatgcatgtgacacacatgcctacacatgcacatgaacacacaacccaaatacacgtacacacgcatgcatgtagacacatatgcatatacacatgaacacacatacacacacgtacacacacatacatacttcttccctctgcatctgagcttgacagtgtgcatgaagtagacatatgatccagtttgtggaatcggtacctcctcttccccagaacatcaggaagcgaccagaaaggcaagccacttgcatgctaccttgcaaactgacctcagggcactgtgaaccttgtgctcggcagccccaggcatcccggtgctgcttgccttccccaccctctccccgcctgtctgagctagacaaatttccacccccggctccccacctcaacagtctccccagccccagctcagcatcccacacacacatgcaggctcaggaaggagaaaaaaacaagagggaaagaggcaagcaacggtgatttcctttcacttgggcaggctgaccgtggcctcaaggaccactgtcgcaatgcttaggcctgagcacgcatttgtctttgtttggtttgttgctttggtttgtttcgttctcctggctgaattaccacgtggcagcagatcctttttctggagtaatggaatcttagtcctgggtgtttggggctgagaaaatgaacgttccatgatgctataaacgaaggaagataagaaactaactagtccagctagtttttgcagaatgctgtgagagttacaggataggaagccactttcctcctgggcccagcccttagagaggtgcctgagaggtgagggaggtgctctcagagctgcaggcactgcactgtgcgcattcccaccatgagatgcctggggaaggggtcagattccagggctcagggacacagaagccccttctgaagtggggatagctgagaatgcagaggggagacaaagtgggcggagagacagctctcctagggagagcggaggtctagaaaaggtgctgggatgagagggcgggttttcacaggcccatgcatggcacatgggaggcccacgacacatgtttattgaatgaatgaaggaatggaaggccatagctgtgagcatgcttgtgggcaggggtggttgagagagctgacctcgcactgagcaaagaaggtgaagggctgtagaggggaagggagaggcctctggggaggggagaagcttcccgcagagaggaggggagagggctccaggggaggggaggggcctcctgcagagaggaggggagagggctcccgcagaggggaggggagaggcctcctgcagaggggaggtgagagggctccaggggaggggagaggcctcctgcagaggggaggggagaggcctcctgcggaggggaggggagagggcttcagggggttcttaggaggcaaagagtcaatgcttctctttctaggatggtttgaatgcagttttgctctaaggcaaggaaatgaacccagagacccccaggggcccttctggctcctggctctgatttttaacttcagccaaggtggggaggagggtgacaggcaacaaggcccttagagctgtcctctggctgcagagatctctccctgtccagcatacctagtcgacaggctccaggggagcttacgaagggggcgtcccagctatttgcgttctcctgagtgatttaccaaccccctgccaatacaactccatctcctggagaattaactggctctcctgaactcataaataattagtgagtctgtccctgatgccacttaacaatttgtgttttcaaagcactttatgcccattaactaaagaattcccaattcacctccagaaaaacaggacatcataagagggagcctgaaaaggcctctggaagtcatctcatccatcccccggcctctgggatatggtaaaactaaaacaaaacaaaatacccaacaaccctgttttgagaacacatcgagatctaaacgccttaaaacaaaacagaacaaagaaaaacaagatgtcaggagggcaagctgctgtctgacgagttaaccactagaccgaacccaccaggccaaggagccagggaggtcccatggagtgtgatgggccagggagagaagcctgttaaaggggagagaggtgcttaatttaataccaggcaaatgcaagagaccttgaaccaatagataggtttccttacctgcaggtagggaaatggtaatttgctaacccaaacccattcattagcctgtaaatgacgcagctcttatacctaggagtgtccctcttaattagaccccatacctttgcccagcctcattttatgttttgcttctggcttggggcagaaatggccgttcatgccaactggcctctccccatggagagggagagctcgctgtgcctgtggattcatttatagtcgtcaaaacaagattctccagggaggcagtggtcggccaagcccaagggctatggagccacaaggattcaaggaagcatcactcctttgcccttttagaatcatgacctcttaattaatcagcaaggaactataaaaaacctactgtatgcccaggacagtgtgagaaatgagagaggaaaaaggagtctccatttctgccccatgaacaggaagggtgtttccctttggaatctagagtccacgtggtgcccaagaacggcatgggggagtcagggaagcagaggccaagcaagactcttctacagggaaggtacttagacaggcaacttcctattccccgatcacccctgccatcctcacggccaaggaaagcaatgccaggaataaaggcgatggacaggtggagggtctgtgtctggcacagcagagcaaatgcctaccagagcacaaaacccacagctaacaactatgaaccctggacagaacaccaaaaaagcaactattagggctgggtgtggtggctcatgcctgtaatcccagcactttgggaggccaaggcgggtggatcacttgaggtcaggagtttgagactggcctggacaacatggcgaaacctcacctctactaaaaatacaaaaattagctgagtgtggtggtgcgtgcctgtaattccagctactcaggaggctgagacaagagaactgcttgaacccgggaagtggaggttgcaatgagccaagattgtgccactgtactccagcctgggcaacagagcgagaccctgtctcaaaaaaaaaaaaaaaaagcaaatcctaggaggccctggggagtgaaccaaagtgggcagacaccggagagaactggctgcttggaagaaatggatggcacaacgtgagtttcctgttttttatagcaaaacttgagggcaggctgaagtcagcacagcacagacagctaaccctccagcagaaatcaaaacagcagcagaaatcaaaacagtgtggtactaccataaggacagacacagagaccggtgtaacagaacagagagtctatatgcatctatggccaactgatttttgacaaagttgtcaggaaactcaatggggaaaaaacatgtctcttcaacaaatggagcttggataactggataaccacatgcaaaagaatgaacctgaacccctacctcacatcatatacaaaaaggaactcaaaatggatcaacaaccaaaatagaagagctgaaccataaaactcttagaagaaaacatggggttaaatcttaaaatccttggattttgcaatggattcttagatatgatgacaaaagaaaaaaaaatgtaaggtggacttcatcaaaattaaaatcttttgtgtatcaaagggcatgatcaggaaagtgaaaggcaatctatagaatgaaagaaaatatttgcaaatcatacatctgacaagggtctagtatccagaatatgtaatgaaaccttacaactgaacaacaacaacaacaacaacaaaacataattaaaaattaggctggatgtggtggctggctcatgccagtaatctcagcactttgggacactgaggcaggcagtttgcttgagcccaggagttcaagaccagcctgggcaacatggtgaaaccctgtctctacaaaacgtacaaaaattagctgggtgtggtggcatgtgcccatagtcccagctatgtggggggctgaggtaggaggattgcttaagcccagggggttgaggctgcagtgaactgtgtctgtacctctgctctccatcctgggcaacaaagtgagatcctgtctcaaaaaaaaaaaaaaagacaatggacttgaacagaaatttctccagagaagatatacaaacggccaacaagcacatgaaaagatggtcagcaccattagtcatcagggaaatacaaatcaaaacccccataaggtaacacttcacacccaccaggtcagctataattaaacaaatgaaaaataacaagtgttggtgtgaagaaatcaaaacctttgtacattgctggtgagattgtaaaatggttcagtaactgtggaaaatagtttgttcgttcctcaaaaagttaaacatagaattaccacatgattcaatagttccactcctaggtatagacccaaaagaactgagaacaaggtctcaaacaaacacatgcacacacctattcatgcactgtgaacaacagccaacagggggaaatggcacaaaagtccattaacaagtgcacgtggcatatacatgcaatgaaatagtaattagcaattaaaaaggaatgaagtactgctacaagcttcaacacggatggaccttgaaaacattatgctcagtaaaagaagccagatacaaaaggtcacatattgtatgactccatttatgtgaaacatccagaataggtaaatccacagatacagattgtggctgagttgttgccaggggctggaaaggagtggggagcaactgcttaatgggtaaggggtttccttttggggtgataaaatgtcttgaaactagatagaggtgatggttgcacaatattgtgaatgtactcaacgctactgaattattcattttataatggttaattttatgtcatgtgaatttcacctcaattacaacataagaaaaacctccaagaggaaactcacagtctagaattcagggcaaccacaggcaccagaaagtgaggatggatcctggaaagtggagagccagtgaggggaacatcaaattctttgtatagatgatgcctaaatctctggctgacccctgaactatatgtactcagggcagactgcaagtaacccagctgaggataaatgtactgaactgagatttgagctactgccccaagggagagtttgcagtttgaatcaattaagttagttccccctaaaacaaaaagtaaaatcaatacttgttgaagaaatgtaatagaatctagattctctctgacttattgcaatgcccaagatatattcaaaattactctacatacaaagaacatgcaacccattctcaagataaaagataatcaagactgaccctgaaatgatgagatgttgaaattagcggacacgaattttaaagctgctaatatatttcatgcaataaatgacaatgtgctcatttagtaaataatagtaaatctttagaaagctagaagttatatataaatataacttttttatacattatatatatacatatatacaatgtatgaaaattttagaactgaaaaataaaatatatcagatttaaaaattcactggatgggcttaaccaaaacatggagacaataaaggaaataatgaacttaaatatatatccatagaaattactcaatctgaagaacagagagtaagaagattgaaaaaagtgaacagggacaatataaaaacatctaacataggtgttagtgaagctcaagaaggaaagaaaaaatggggctaaaagtttgaagaaataatggttcccaaatttggtgaaagacatgtatttacagattcaagatggtcagtgaactctaagcaggataaccaacgactcatcatagtcaaacttctgaaaacctaagataaagaaagtggggacaagaggatattacatccagttctcagctacccgtcctgtgcatttcaacaattagacaattggtacagacctggacaccaatccatgtgtccactagagtcagcttcctaccatagtgtatggggaatgctgagctccaattgcccaaacttcagaaggctttgcccaggctcattcctgcccagccatgggctataagtccttttctctatgttgaacagagaggtcaaccaaagggagaaaataaccttttatctctgggttgccagaaagtcagcaacacgttggaaaggggacccagggccctccctcatgcccccgttatctgcatgtgcagatttcagctgattccccaagcccgatgcagaggtctctcctccctctgtgagtccctcctgaactacagtatgatgcttctggattccagaaattagggctgttttcatagctgggacaagttttcttggctcagggaggaaagtaatagttcccagtctttttcctcctcttccccacaattcagtgtttgaggagggagggaggcaaagagtgctgtggctggtgcagaggtggaaatccacccactgcctcacttggagtgatttgcaaagggtacgtagagacacttagggaaagtaaggagaggtgcgtctttcttcccgtgcctcaccccctcctcccatgggacaagggcctcagaaggaccacaggggaagcagcttcttcagtggatttcctagatctatcatggcccaagagcaatgctcagatgcccaatgcctgcatgcgcatgattggggctggttctggttttcattttttggggccctgaactccaaggtcttcatcttggaattcaagggccttgaccatctggtcctttccttgtcattccttggagaggtagcgggggcccagccctccccttcacccatcctgcacttggctaatgctcccatctgtaggcctcggccagcccttgcagtgccctctgcctggaatcctcctcctgagcctgcatccctacattccagtgactaagtatctttatgtccccagttcaaatgtcccatcttccttaaagtcctttctgatgcccccatgaggaaggtatttcttccccattgagtcattgctttctatttcattttgatttattcaatatttttgttatgctatagataactatctgtcagaagctcttctaagagcttttacaaataattgggtaatcctcacaacaacctcatgaagtgaggactatcatcctccatttacagatagggaaactgatgctcggagaggctgggtcacttgtctagggtcatcatagaggcagtctggctctggggttccccctctctgttctctattgctctataaactgcttgaggcctcatcaattgattaagtagaggaatagaaaagcctggcactctgccaagagccctggggggaaggaaggagtgagggggaggaggccttccccctgaaggcccccagagcttgaggaggacaagcccagttggacaagactgaggaaataagatggtaccctaaccgagttcagtgcctctctgctctgcaaaagcagggatagggtggggagagcacagattgtcttctctctggttgcctagctgccccctgatctcacctgacactgggactctgatcccctttcggtcagctccactgcaccccaccccgccccagatcccgactctctctgcttcttcacgcctgtgggcccaggctggactgctctgcccgtttcccggatgtgaaacagatccatactgcagagggaattgcccttcaataagtgatgagttcccccaagagctctcctgtgctttccccctccagagaattttctgttttgtttacttaagggggtgattccttttcatgttctccttcctgtatcaaagacagcacggcagacagaccattaacaaagcagggcctccgggttgtttttccaggaggaggactgggcagggccgctcagcctgctgggcctcctcaacctccaggctccctcccaggtccccctcactgctggctggagcaggagcagggaggaggacttccctctgagagcagaaaattgggattcaaaatagaccagtgttaggaagccaatagcttctccatacatactccaggcaagctgatagaactgatagttcatatttttgggctgggcgtggtagctcacgcctgtaaccctagcactttgggaggccaaggcaggcaggttgcctgaactcaggagttcgagaccagcctgggaaacatggcaaaaccctgtctctactaaaaatacaaaacaattagctggtgtggtagtgcgcctatagtcccagctacttggaaggctgaggcatgaaaatctcttgaatccgggagtggcagatggcagaggttgcagtgagccgagattgtgccattgcactctagagagactctgtctccaaaaaaagaatagaactgatcactcctattttttagaagagtagagaccctcctaaaatcaatcttaaaatagcaacagcagcaaatgaactctagtgcttcccagaatttaatgtgcatgccgcacctggggaatcttaaaatgcagattctgattcatcaggtctggggtgaggtctgagtttctgcatgtttagcaaccgctgagtgatgctgaggctgccggcataagcaccgctctcagccactcaaggaactggtgcatccaaaagccctgaactaatccggcttcacgaggggaagatgcaactataataagggtggccgtggtgatgttgttactaggaggagtggttattgagcagttactctgcaccagatactccatgccactgtggtacaacagaaggaaaatctatccagccttgcaggattttcctaatctctctccaagagtcaacagggaaggaggaaactgaatataagaggattaacattttctttgcaatatgtctcactgccccatttgatagacgaagtaactgaggctggaagagctttggtagcttgccgaggtcccataactcacaagcagcagggccaggattccagctgaggtgtgctctggctttcaagaccatggtaatttgaacacagcctctcatgagacagggagacagaggcagagagagcagtgcataccaggcaggaccagacaagcaggcaccagggcgcgaggcggaattccacatcctgcctgtgacgcccaagacagtctcctaggcaaaactggggaacttcatggagaagtttctaggcctgctcaccattcttctacctcacccttgtcgtattcctggagcctgagagaagagggtcccctggccttgtcagccccatgagagggggcagcaggagaacagggtcctaggtggtggcctctctgctttccagagcaggaaactgaggcctggagaggggaggggaacacctgaaggtctcaccagtgggcagggcagggttcttgggcttgcgacctgggcagtcaccctgggccccacgcctagaagggcaccacccttggtgtaatatttctccgctgccatcttgaaattctgattaattttttaacaccacattttcttttcttttttctttttctttttctttttttgagagagagtctcactctgttgtctaggctggagtgcagtggtgcaatctcggctcactgcaacatctgcctccccggctcaagcgattcccttgcctcagcctcccgagtagctgggattacaggtgcccgccaccacacctggctaatttttgtatttttagtagagacaggattttgtcatattggccaggctggtcttgaactcctgacctcaggtgatccacccacctcagcctcccaaagtgctgggattataggcgtgaatcaccgagtcctgcagcattttcattttgcaccggatcctgcaaaagatgccgctggtcctgccagtgggttagagaacacgtcagggctataccccctttccgagctgctcctggaggccaagacctgagcactgagcgagacagagccgtctctgggcaggctgctgcaagccccaacctccaggcagcgggagcctggcaggctggaaaacaaaagaaaacttcaggagaggccaggagggaggaaggaccttctgagagggcaagagatgtgccagaattgcgcctgagcgagctggggaacagatcccaagtcctcctctcttgtctgtagtgacagatgaatgcgttggccggggctcgggagggggaggacaggggccagttgtcttcagggccctggcctctccaaggaaacctccacccccaccacacccaaaccccaagggctgggcaaatgcacggcgcccagctatgccagcctgtcccaggggctctggggaatttaagccaagtccttcactttgattttgggttggccaaaggagaaggaaaaggccaagtggattggattcagaagctccagcctggcctgcaagttccagctcagacaagaggcctccctccagctccccatcccccaccactggttactcaggcctggtggagagcaaagccagccagacatgcattcctctgggccactgtcctgtgcccagaagacaggtgctggcatcagacagggctgaggaaggaattctgggatggaggcaggacagaagagagacttcatcagcccagcacattctaggaagacagcgatggaatgggagggttctctggagacctggggacaggcctgaggttgtctgagccccaggggctggtcttcgatgtggaccccagagggtttcctgatttatccatgagcttggacctgctgtgctgaggacagaggggcagtgttcggtctccttgggtagcgtcttcaccctgtgaccccttctccatcttggcctgcgcagggggcccaatcaacagaacccaacactagccgggggggtgtaaaatccaaaaagaacctttgcaatatcggacaactggtgaacactgccagcatgagcatcttgtatattttgaaccaactctaccagcccattttctagttgctaggatggtcacctccaaactcatgggggttgttgaaaggattcgatgtgttaatacatgtgaggcgcttagaacacagactgggaaggggataggctttatataaatggtggttattaccatatttcctctaaatgcacattgttttcattttcatatctctggagtcagaatgtattttgtggattaaatggcagcattttttttttctttcttggcggcacataaaataacatgccttataattgatgtgtcttaggttcagtcaaatatgggatgaaaaggaacactgtattcttaagaccgcatctttcagcgacgcctccttccatgtgagttgagtcctggggtgctcctcagctcccccacccatgtggaaacaggcacagaggccacagggagcaggaggccccagggagcagagaccccaagggcatgagggataagcacaaagtcctgggccaagggtgcccaggttggctgagccctaggcggacaggtcaggagcacggtgggcagtgggtgggacaggcccctaacagagcccctcgggctcacatagtaattccattgctgggtcagccacgttcccaaatcgtacatcagacaatcttcccaccaaccctcgagtgtgaggatgttttgtttgtttaaaacccacatttggccgggcgcagtggctcacacctgtaatcccagcactttgggaggccgagattgggcggatcacgagatcaggagttcgagaccatcctggctaacacggtgaaaccccgtctccactacaaatacaaaaaaaaattagccaggcgtggtggtgggcgcctgtagtcccagctactcgggaggctgaggcaggagaatggcatgaacccgggaggcggagcttgcagtgagccgagatcgtgccactgcactccagcctgggcgacagagcgagactccgtctcaaaaacaaaacaaaacaaaaccaaaccaaaaaacaccacatttaacagatgaggaaactgaggctagggaaaggctaagtcatctggccaaggtcatttagccaagcaggcagaactaggccacattacaggccagcctgagaatatggcctcctcaggagcacagagaggaggcaggggggccaggatgccacccagcacacaccgtggctgagaacacaggctctgcgcccagttcctgggtccgttcctgaatccagcactcataagccatgctactctgggcaagctgctgggctctctgtgtcggtttcctggtccatataatgggaaaatatgcttcctcctagacgcctgagaggattggaggggcagatccacagacagcatctagattgacattgcacctgcaaaggctcagtcactgtgagcttttatgatgccctgagttctggggaaccccaaaagctcctgatccgggagctgacctgcaggttcccctaaccccactcatgggccttgagtgtctggggctggtgtggcataggagagctaaactgaccacctgggacgggcccagagagccacacccctaaacaagcagccagttctggggtcaggagagccagggaagtggccgtctgtgctgctcatggggtagcccaaggctggtcactcctcctccctgattcccagccctgcagaggatattcaaactcaccacacttcagagaggtgctggggcacacgagaggaagtgtggcccccttccaaagccacgccccagagactggctcttcagccaccccctcccacccctggcaaaggctggtggctacccagatgtggatctggggtgtccatgcccagacccccctggacgtgagctggagaagccagatcatgggtccagctgttctgcagctctcccacctcccaattctgctgattcctacgtgggggatggtgccaaggagggtccagagaactcagtcctgccagagactggccagcagctgcagtgggtggagcctgcggagggggcaggaaagccaggctcctgagctcgcacctcacttgcctttcttggctgcacatcctcctctataaagtgaggtagccctttgtaatctgaccttagtaattctctttgttccctaccattttagctcagatacgggccctcagggaggctccagaatctggagcccaaggagggtgctgggaagaaagaccacaagccccagacgcatctgcctgtcccacatgtgcttagatgattcaccgtggtttaagctgctgtttccctcctgacgcttgcatagcttctatgagatggttgctgcccaggaatgcaagtgaccctgagtgtaagcacctgagggcagaagccacttggggtgtggccaggtacactttggccttagtgattagatacgaccaaggtgcgtatttgctgtctataattgctgcttggtatcagtaaggatgaaaaagaagaccccagcatttcctagggaagacgggggcccctcccatcctacaagactcagcttctatgttacctcctcctctggggcagcatctcaggtcatccctctggactcccaaatcacctgtcctatagtaccaaccacaggcttgctgccttcacttgaccgtgagcaatttgagggcaaggacctgccttagactgggctggatcctgggcacctcacttagtatacagatggtgcttagtaagtgcatgagaagcaaaagaggttcatggttttggttatccattggctcatgggggttactttggagcttctagaaaagctccttctcccaggaaggagggctctgggctggattttctttccttttcttttaagtcaggacaggaggggcaagagcctcctgaaggaagaagtgaagaatgagtgctggtcaataccaaccccccaccaggtgcaaggccatcaccacgttcaagttcatgtgttaactgagctttgctgtagccctctgcagttgcagcagccgactcggagtccatgggcagaagtagctcagctcagccaccaccatgacacctagactcgggccctaggagaagcaccttctcttcaaatctttatgccaggccttctcaaagtgggctccctggaccagcagcagtggcagcgacacctgggaactgtcagaaatgcaaattcccaggcccctcccagacccactgcttcagaagctctgggaatggggcccaggaatatgcattctaacaggtccccaaatggtgctcaagtatgagacccactgctctaggccactcccttacctccatcaagaggcaggtgacacttgggctctcagaatgtggctcctgatgcctcagatgaaagggcaccccctcatccctcccatcccgccctcctccctcctcaacccccaggttcccccagggcctggcactatgaggggcctaagtgtcgtccctctctctgccagcatctaggaggcatggctgtgcctcagcttggactcagcctgggctctaaggacccaggacccctcaagatctttctcagcagaggcctaatccctaaaccctggggctggacattccaagttcctggagacacaataagtcctaacattcccggggaggtggcaggcctgggggcacagacaatgggccttgtgttcgtccccacgccttcctgcttcaaaccagggctctgcaagggaggctgagctgtcaaaagcaccactgtccaccccgcttgtcctgcttgcctttgcccaaggcccaggctgaggctggcaacccctcagcacaccgcccctccctgaagcagaacggtgttccttcttcttggtggtttccagcactttctaggttcttcgtccaccagggcctgaggaggaaggggttaaatgccaacacctcccttctctgtcttcgtggggctctgggacagaggagcatgggcagtggacagagctctccagccacctgaagccacagccagaagcgcctcctctctggggctgatttctcttcattagagccatcacatcaacactgacagccgcgtatttattactgtcccgacgactaccatttttcacccagtgatgcgcaggcggataatgagcttggagcccagctaatgaggaactcccctcggccctccttggcagcccaggccccacaacggtctgccggccaacccgctctctgcctgtagacactacaccagggcacagaaaggaactccaaatggggaagtcaagggtcaccaggctgagccagccagagctgtccaaagccaacacgcacactgcccgtggggaagagactttggggttgaccgagcaatcaggtctgagcaccgggcaccgtctcagggcagaagcccctcttccattctgggttctgagtcctcaagccagggcagccagagacaaacatcagggatgggcaggtgggctgccggccaggaaccccaggggaatgggtgagcaggtgggctgccagccaggaaccccggggaactgggtaagcaggcgggctgctgaccagaaaccctggtgggggactgggtggatgttttgggaggaggtgcttgaacctaatcaagaacatttccttagtgatgcatggggaaggcaaggtgcttgcagctgtatggggcaccagccacacacagtaaggacctactttgcaaggggctggtcttctgggagcctcagctcttctggaaggtacccacacatctaaatgaaaaaggcccctgggcggtggacatagtgatcccagagcccaaacctctgactaagagagtcttcaagccctcaactagtctccaaataagaccccactgctggtgttgattggcttgcctggcccaaattaagagggggaggtgggagggtccaagacagctcctctaatggtttggagcagtttgggtgaagctgaagaagaacccagactaccacccaatcacccaagcagcagggtccccttgggaggggcaacagccgtatcctcactcccaccacccttaaggcatggccataggccagccatagcagataggcagtgtgatggttaatattcagtgtcaacttgattggattgaaggatgcaaagtatggttcttgggtgtgtctatgagggtgttgccaaaggagagtaacatttatgtcagtggattggcagaggtggacccaccctcagtctgggtgggcaccatctaatcagctgccagcatggctagattaaagcaggcagaggaacgtggaagaatttgacttgctgagtcttccagcctccatctttctccccgtgtgagaggtttcctgcccttgaacatcggactccaagttcttcagctttcgaactctcagatttacaccagtgattttccaggggctctcagacctttggccacagactgaaggctgcactgtcggcttccctacttttgaggttttgggacttggactgacctccttgctcctcagcttgcagatggcttattgtgggacttcactttctgactgtgtgatccaatactcttaataaactccccttcatatacacatctgtcttgttagttttgtccctctagagaaccctgactaatacaggtagagtgactcaactatgtttgaggtccaactgctttagaaaacagcacagaaaattttaaacacaaacagcttaaatatatacatgtaaagcatcttagaatcttacagatgctgtgactcattcaagtctttcaagaccagattttgatgtatgttctagggggtccaggaagccatggggacgacaagccacatcttccagcagcatcaaccagctttaacatatcctttatgtgttgggatagaatttagatagcccatggagtagaatgcacatattcacacattttaaaactaaaataggctgggtgtggtggctcacacctgaaaccacagcactttgggaggcagcagcaggagcatcacatgaggtaaggaattcaagattagactaggcaaccgagcaagaccctgtatctacaaaaaaaataaaatgattagctgggtatggtagtgtacacctgtggtcccagctacttaggaggctgatgtgggaggatcgcttgaacctagaaggttgaggctgcagtcagctcttactacgccaccgccctccagcctggctgacagagaccgacatctcaaaaaatataaaattaaatataaaataaaatttagaaatatataaggaaaaggtcatgggatagtaggtggtttcaggctgcatggccggataccccagggcatgtgtccaccctccttaccatgagtggaacatcatggaagagtttggaaaagctgcatttaccttcccatttttttcccaatgaggacacttgtggccacacaggctaaaaggcctggcccaaaaggacccaatgagactcttccactgtggcctctgaggcccacacagagtcatgaacttgttatattctctctctgacttcacaattacctccatagcacccttaaaagagttaagtgcattaattcaagaaataatttacgtctagtacctcagtccttgtggatgaagggttattatctaaactcaaggagttcacaattaaagaaatcagttacacacagatattaaaagataattcagaatcaacaaggccaaagtgcccagcgagacatctagactggaacaactgggaggaggagtcccagctggaagtcagggacggcttcacgctagactttttggggtcagtggagaggagaacaggggttcgaaaggggagaaaggaaggtgctattgggctggcagggtggggagggcagtgtgagcttggtggaaggctggcgtggggacaggtggaggcgagattgcagtggcaggtagggccagattgtggagagtttgccgttgaggccacagctgtggggaagctaccagggttctaagagcaagggcgtgataatgacaggtctcagcatccagaccccatcactaagaccctatggacatcaagagggggctccaagtgtccttagagaaagaagaggccagcccagggtgccccctgtgtcctcctcctgtgcccacccaagctaaggagaagcctgtggtcaaatgagcctaccctgggtccaccagcccaaagcagcatggcaaacagttcctgaatgtgggtatcttggccaaatctaaggcaatggcctgggaggcagctgacctgcattcatcatctctttcttacaagtcaagcgaccttggcaagttacttaatatttctgaacttccatactaacaatgttaataacattaatactttctggccaacctccttcatagactggggtgaagagcaaatgcgatgtctatgaaagctacccacatacatttgagattttatggcaggatccaataaatacattcaccttaaggctgaacagctgataatagcttaataggtgggttctctgtgccatatttgcattttaagctggagacagagaatgtcttaaccaaatcaataaatccttaacagcagaagtttagatgccactggcaggtgtgtgaaagacaaaaggaacaaaagctgtcggggcaggggcacctgtcaaactgcaggccccaaacggaccttgcttccaagataaagatactaaggacaatgacatgacaaacacttattcagtgtttatgatacatacacagaacactgtgtcctaaaagcttagcacagctcgttaaaccctgtcacaacccaactgttatcctcgttttacagatgaagaaactgaggcatagacagggtgtgtaactcatccaaggtcacccaggcagtaaatgacaggtaggatttgagcccagggagtcacccgcatttcaggtttctatttttttttttttgagacagagtctcactctgtaccccaggctggagtgcagtggcgccatctcagatcacagcaaccttcgcctcccaggttcaagcaattctcctgcctcagcctctcgagtagctggaattacaggcacgtgctaccatgcccagctcatttttgtattttgtatttttagatggggtttcaccatgttggccaggctggtcttgaacgcctgtcctcaagtgatccgcctgcctctgcctcccaaagtgctgggattacaggtgtgaaccactgcgcccggcccatttcaggtttcttggtgctctctgctgtcccgtctgggcccctgctgccactttctgcactggctctcacggctcgaagcagcaaatgaagcatcagctccagattcataattaactcacattatgtggtgacagcccaattgttcaggtgcccagtgatatttttgacctttactcagattctgggcctcccagatctgtacctccagggaggtgcccagggaagggggaaatttccagagtcctggctttacgaggcccttgagagtcactggtgtccgccccagatgccaaattccctgaatgagcctcattatggcaaataatatttccttccgttaggactgtcacatcatcaaaatttcatcacccctctgggtcactaatagcttcctacatggcatcaaactttaattgcctttcttcccctcatcctccccaccctcacacctcattcaatttagaaggcatttgtgtggctcagttactggcaagccagttctgaatgccccaaatgaccttaagggaactcctcaaatagctttggggcatcccaaccccagagagagatggagacaaggaggagagcagaagaccttcaatattctgccaagttaaggcctagtgaggacacagccagggtggaggcaagagccaggaggagcaggaggaggaggaggaaaaggaagaggaggaggaggagttccaaggcctctttccaaactctacacccctccctggaccagcccgtcttcaaacagtacaattgtctgggcatctccctggagaatagctgtctcttcttgggaagacagtgacgtatgccgtggaagccaaaggcagcctggagcagtggaaagaggacagatgttgggaccagagaggcctgggttcacatcctgactcctcaacttccccgctagaaggtcttgggtggttaatctctcagcctcactttatccacatgtcagagtgatagggaggactgaggcagacgatggttgtaatgcaccttgccatgtctgacaagcagaactgtgcaccaaacgtgagctcgggatggaagggaagacaaaaagattctaaactggggaagaagcaaaagaaaatggggtgagccaagtgcggcagctcatgcctgcaatcccagcactttgggagaccgaggtgggcgagtcacttgaggtcaggagtttgagaccagcctggccaacatggtgaaaccctgtgcctactaaaaaattggtcaggcgtggcagcacgtgcctgtaatcctagctactcgggaggctggggcaggagaatcacttgaacttgggaggtgaaggttgcagtgagctgagatcatgccactgcactccagcctgggtgacaaagcaagactctgtctcaaaaaaaaaaaaaaaaaaaaaaaaaagaaaagaaaagaaaagaaaaaggtgagaagatgtggaagatatgggtgaaatatacagcaaagataccagagaagaaaagccgtcttaatgcagtcttaaggccatttggaggggcaagcacagaagtacaaatatagttaaagtcatttattaaacaagtgcttatgatatgtcaggctccattctcactgctctatgtgtattatctcatttaagccttggaaggtttttctccttgttttacagacaaagaaacagaggttgagaatgttaagtgacttaacccagagtgccacagatagcagctgacagagcttgaacccaggtcagcccaattctgaggcactgatcctatacataccacttcttaacagcttaagggggaataaaataagcctccaaacaaggaagtaacagcacagactggggttctgctttaggaatgtgcaaggtaaaaatgtcttgtgtaaagtcaccctctgtatgaaatgcagagaccacaatgtcttctctgtggttatgaaggaacactaggcattgccagtgcatgagatcctgttgtctttttccagcacacgaaagcctgcacttcctagctcccttgccattaggtgggaccatgtgatccactctaatgaatgggctacaatcagaagaaacacaggctaaataattattattattgttttgagacagagttttgctctgtcgcccaggctggagtgcagtagcgtgttctcggctcactgcagcctctgcctcccaggttcaagcaattctcctgcctcagcctcctaagtagctgggattacaggcatgcgccaccacacctggttaatttttgtatttttagtagagacagggttttgccatgttggccaagctggtctcaaactcctgacctcagcctgcctgcctcggcctcccaaagtgctgggattacaggcatgagccaccgcgcctggaggggaatataagtgctgaggcaagatcttcctctcccttttcctctggagcattaatcaaggaccttgtgtatttcaaatggtacatccatgtatgaatggcattaccccctaaaccttctacccctcctctcaatttccttcacatcataaagttggagttcagctgatggggcttcagcagagacccaggggctgcccaacccagatgccaggcctgctaagaggcagattcatctgtcgggccagaatcaggaagagctgggaaaatgaccagaaaatctgagcagggactcctgtctcaatggcaacactaccccattccatggatgcatctgcgggagctgctggagggcggggcccccactcttgaggtacctggctgctcagtgcgctgagggctacatggcatggggtgtgctggatgtacagagacgagaggcatttcacaagtcaatcagctctggagatggggcgagaggcctggcaggaagctggagagctgggaggggccagatgaccgtgggctgtatgcctccagtaagcattcattcattcattcagtcttcatattatgctgactcctcctacgtgccaggcactgccctagtggctagaaatataccagtgaatgaaacaaagcccctgccctccagagacaccaataataaacaaacaagtcaatatatgtcagctggagctgagtgcaatggagaaaatgatggagagcgagggagtgggtgctggaagatgccacgttatagggtgctccgagatggataagacatattaggaggaagtcctggaggaaacaagggtgaactttgtagacatctgggtggtgtgggcaccactgatggaaaggcaggaacttcaagtgccaggttggaggcctggtaaattccaggaacaacaggcagtcagtgtggggacaggagtgaatgcagggggagtgaggagatgaggtgggaggggaggttcatgtctggggagtagaggggcagtgatcaggacaccctcctggactgtaatggacacattataagaacttaacatttacaaagggcattttcaaagtgatctggacaatctcatttgattatccaagacaactctaaaaggtagataacagtcttttttttttttttttttaatgagacagggtctcgctctgttgtgtaggctggagtacagtggcacgatctcagctcactgccacctccgcctcccaggttcaagagattctcctgcctcagtctcccaagtagtttggactataggctcccactaccacgcctggctaattttttcatttttaatagagatggggtttccccacgttggccaggctggtctcgaactcctgacctcaagtgatctgccggcctcggcctcccaaagtgctgggattacaggcgtgagccactgtgcctggctggtagacacaactatttttaactttactcattttacagatgagaaaactggctcagctcagcatcgcccagtgatggaggcaggattcaaaggggcagaagccacgctgggagccattcaccacgtctgcaggagaagggtctccccagggctccctgggctcagcaagaggctttttggtccaggcaccaggcccagggagtctgaggggacaagccctgcagtcccctctctcccttcccccggggatgctgagcatccctgctcaacgctgctcactggctctgcctcctgcccagcacatggacagcaggggtgggacacctaggggagggggcacccggggtgtctcggcaaccagcttgttttcctttccattacaggcagtgggctgcagccgccagttgctgctggcccatttgttgctattggcatcccaaggccccaaattatgatgactaattcccaccgctttaggcagctccagggctgtctgtggcaacatgctccagggggagcggggtagaaaccccgcagggcgcacactaacacccgacatcaattccaactcagcctcctgcctcccagaggggctgggagtccgtagggacagggagagggttccagccaatcagaggaccccttcaaccacagccagatcctaggaaaaccagctataaggggacaatttcttcatcagcataaaacatagctaacagccagctggtgttgagcagtagtgagtcctccatcatcaagggtatgcaagcagagaccagatggccttgtgggcagacgacggtcctagatgacttttcgtgtgtctttcaagtcaaatgcaatgattcccattagtccttaggacagaagataagcccattctcccctccttgttagcttacagcccgactgcgtcctgtggtacaaagtcaaatgtggaccaatatgcaggttaacacttcattttaaagtcagccattcaggcgctgtttaaacagaggatcgctgtaaagaatttggcctccttcccagcctcctttcccttgtagaacaaggttcctggcccctatgccggccttccagtagaggacacgaggaagaggcagtcgataaatatttgccgaacaaatgcatgaagcgggggtggggtgtgtgtgtgggggggtcgagggtgggatttccgaggcaggtgtcaggctgccagcgggatgtagcctctgggtgggggtcctgactctgttcctcccaggcaggggccattttctgcagccagtggaagcaccaagctgtatccctcatctaaccactgccagaatgttccggactcccccgcggaagccaaggggtacaaagggtgagggaaagaggggcatgggagagcagggacacccccattccactctcgagtggggcttttgacagctgagccccaggcaagcacgacactcggcctcctggtaattagcgaaaggccctgatcaataagttattttttgctgtcagtaattaataattacagcttagccacaccatgtaattaaactttcatcccgctcccttgtgtactgttggcttttattgtgattagctcccagcactaaactttctccctttggagcctttcaggagcctctagagctgggggttccagtcctctttcagggttgtccccactgccttgttctctcggctcagattcccttccttctgttctccccccaggcatgattctcttgaaagaaacttctggagcagctggctcggctgctcctgcccttctcccaacctctcaggctggccaggatgacctccagcagtaatcaagcttccaagcacatgggaaatctctcgagactctagttaaaagacttccaggctcacccagacctttccaatcagtgtctgggagcggagcccaagaatctgcattgctacaactccctgggagctaagtgcttgagggccactctttgagacacagtgatgtggccatggaaggaatttaaagaaacctcctgggtaaggaaaaagaattcaaggtcttattggtgggtggcagggtaccattcttcatggacttctagcttaatgttaaaaccgtcataacaagaataataattgccatgtattaagtaccttctatgtgccaggcactggctggggccctgcccctggaatatcttgaattctcctagcaattctacaaggcaagagctattattgccagtgtacagatgaggaaactgaggctcttagtggctaagagccttgcagaaggcctctcttcagcgaagcggcaaagccagatcatgagagcccgttctttctgctgccaaagccaatgctctttctacaacctcactgcactttgcttgggaaatgagtttgcatcatgtgacccatcgggcatacggccaatggtcaaatgttagctttcagtatacccaggtgatgtcgctcaggtccagcacccaccccccatccccaaaaaaaaccaaccaggctaggctcagataaaatctggtgacagtggtcgatgtgaagtttgtctcaagggaggaacaattgtttcgtccctcgttctgtgccatgcctggagaagcaggcttgtgggctcagaaatgacagtgctagtggcttcagctaccccccaaaggattaatgtcatggcctgagactggaaaaaactcactctctaaccccaaagcagataagaaaggacctcatgccctaatcccaccccctccaacactcaaacccagcactgccaagcctaggaccacgttcccacaatcctttgcaaggcttgcctccagggacacacacagcaggagagggctcgatgctggaaaacactctcggagccagagaacacgagcggagcagcaggggacctgggcagcctgacacgcaaaaagccagcaaacaagaaaggcagagaggaagtgaatcaatcacagagactttctctgcttctgacagggaagcccctcccgcaggaggcgcagggacagggggccacctggccttaacttcagcaggaggggtgggatcttggcctcaagtggatggcacaggtgtggacgtggggcaggaagggacacatgaagaccccaaagcaagggccatcaggtgccctggggactctataagggcctggtcctagatgagacaagaattggtgagccacctgcccagggaaatcataccattgttgaaaagtctgtagagcaatgaagttagaagggtccagacagatgctggcatcccgtccctccacgccgtccaggcttttggctagtaacactggttgtcccagagcacaactgtgaggctgctccaggatgaaggacaacccattcctattctgccagcatcagggtcctcctgggacccctcagagagggggcccagaccaaggagaccccatgcagctagtcctggtttgagggagagaggctcagaactcatctggttccagacctgcctctgcccccagatcacagagtggccttgggcaagtcatttaatgccatttggcctcagtttccctatctgttaaatggctactagaataagatgacctctgaggtcctcgcttgttcaaagattttatgatgatcataaaaataataacttttattaccctacatttatagggctcgttacaaaatttcgaagtgcttttatgtaaattacctcgtaaaatcctcccctcagccctgtgagtgagagctgattattttcatctctttgatcttggctctctggattgcctggcgcacgaggcggcgtggggagtgggttgcagcccccacagtccggacccctagggtgggtctggccccctcctgagcctgcgagagtgaaggcctagccctgcgagtcctggagctcggtccaggcttcgtctccctccgcccccagcaggcgccgctcggacaccgctgacaccactgtctggatcggcgaaccccaaagtcgaggaaccgccggtgcagccgcccttcacctcggggacctgcccggggaccagggggacgtctgggcatccaccctcaggaagcgggcagcgcagatcacacctcggatccttcgtagcactcccaaacccaaagccaccagcccttctccaccgcgaggctgctcccggcagccacaggtcacagcagcgagcggctgcacagactatcgagcgaacagcggaggctggaggcaggggcggggatgctgggtgtgggtggatgggtaggaggggaggcctcagaccctccctgtgcaccaccccccggtgggtccgcggctgcacccgcgaccttggctccaggcccgcgcagcgaagcacccccagccccagcggctggccgagcagccaggggcgggctcccgtacgtggccaagccgggcaattgctctccccgggcgagcaacccggcatccagcgctcgcccaccccactccctcgccccggggaggccatcgcctgcccggcaggggccctgcccttccccgcagacaccgagcagggaaccaggagctcggtctgggaagctcagcgtagccgagcgtggagcccggcacggaatgtcgctcccctcccaagccggcgcagggcagccacagcagacggggggaggggagcgcccctcccacttcaccttgggctcttctctgcctccccaggtcgtccccaccttcccccattcggaagccacaagtctcggagagactgccccacccccaaaagagccccaaaacttgggagatggggtgtcttgaaactccctggagagggctctgccacggctaagccgggtgtccaggaggtcaccgtgaggccggccagctcccgccgcccctcccccgcccactctcccagccccctccctgtccccacgtgggggtccctccttaccttgggctctggccgcgcggatctgatgcagagctagcagtgtccagatcaaaagcccccacatggtgaccagcctggagaggggtcctcggggtctcccttccctccgccctgttttataatcctggtggggtccgataccccgtggcttagtcccaggaaacagtcagtctacgcggctccgtgccccggggtgtaatatgcccgggaggggcagcgcttggctaccccaacccttcctcctcttctgtactagtccgagcccggcagcgcgcccggaaggcgaggggcgagcagggagaaagaggccaggccgccctctcggactagggcgcctctctcccttagcaccccaactccgacttctcccaaacagggcggcctctgcgatccggccgggtcgccggccgagctccggaataaatggacaacttcaggaaacttcctcccgtggccacgttgcccgccccctccccgccccctggttgggttctcccggccgacgcagtcaccgccgttccaggcgccgggcccccgggacccggccagagccgagcgcagtggcagacgcgggtgcgggggttcttttaggggcgccggtttcgggggacgcggtgagcatagcggtccgaatctccctggagctgaagttttcttctctctaactttgcaggcagcatctggcggggccgaaccaccccctctgggctccaccgccctcgcgccgaatcgggagacgccgggtctcctccgggggcgctggggccgggcgcgccctcggctccgcgcccagccggctagcaaactttgcgggtcccggagccgggcgcgcagccctgagcgcccatgtccgcgccagccgcggggcggcgggggagggtgctgggcttcgcgacgcgggctgtcgccggcgcccgggcgcagagcctcctgccggcccgaggatggagaccggcggctctgccctccgccgcgccccggccggagctctcgggaagacgcacggagagcccggcgggcagccccggctccggggacgcggcgccccttcggacgcccggcgatcgccgacctcccgggccggaggagcaacggccgccccagcgcctcggccgccgctgccgctcgccgagcccgccgccctccgcttcccgggctcggcgtccagagagccgctcctgcctgcgccgagccggagctgcgggggcagcgtgagccggggacgagcgcggcggaggcggagacgcggagaggggggccgagcgctaccccgtggccgcgactggagagcagcctgcgcgccgggaggggcggcggcggcggcggcggccccgagccaggcccgggagcgagccccgcagaaatacaatccgactgcgcggccgcgggcgcccagcggctctgggacccgcaggggggcagcagtgccaaccttctgccgcgccgggagagatgcgcgcgagcccctccgctctctgcccagcctttccttccagcctcgctcgcgcccctgtctcaaaggcctcataggactcccagagtctcctatagtcgggagcccccagcccccttccggacatggagtgattggtggggaggcggcggttgggaaaagggggtcggtcaaccgattgattccagtttccccttcccaagtcaggctctccaaggtctggaaatgctcagggcggagggggagacatcgggaggcctgggacctgcagaagcctgagaaagtgaagttggtgccaaggagcgtgcgttctttgtttcttcttttttccttcggagcccagcttgtaaagagtagaagaaccggacattggtggaggaattcaaacaagagagcccggaggcgtcctctgctgtggcccagagctagcgcctactccacgaagctcagctggggttaacaggcttctgttaaaatttcccgggcactgggaaaatttcaggtgccttcgcctcggtggactcctttccctgctaacaaaattattaaaaataagattttgcaactgcgttggcataaggaaaagtatattaatattgcatattaaaacatgttcttcagcctaaagctttacttatttttttctgattttaaaagaaatcaaaacattttcatgggccccaaaagactatggtccctggcactgggcctgcggtgcttaatgcagaagtctaccctgcgtgtctgatatttcttctgggaaataaagagctagtgagaccctccatcttttgccacagtgcttctctctactctctctcgtggtcctacttagtctggtcccccacggctgcctagtctttctggtccttgaagtctaggactgtcactcactgattgccaactctttcccaggcgcactcccaccccaaggacaccccttgtgattgctgtggaataggcatagccaccgcaaatatatcgttacttatatattctcctttcacctgctttggaagaagaaccgtaagcatttattaaaaatgtctgagaagctggcctgccttgcctacagcgtttcaatcacctaattcaaacaacatttccccctggcaacctgctccatccccagctgaagcccctctggctggctgatttgtaaatgcgagggctttgggggcaggcagcctagatgtgaccaactctccttctccttggtggccatgtcactcccacctgcttaatgatgcccagatgtgacagtgcacaccccctacatactctgaatgtccccagctgtgagctcaggcccttcccagactgtcaggaagagctctggtctttagggtgctgttactctgttcgctcacagagggggcctgagagccgtatttgcggggaacctctccttctgtctcttaggccagatagcagaaagggctgcatctccgtttacatcacagagggtaggagttcgcgtggacataaaagtctgaaacctgggtggattccaccctgatcgtgcccaattcccagaagtccagcaggcaggaatgtgagctccacgtgcctagggcctcgaatagcatcgttcccttattaagaggaggcctcttgcacaaccgtttggagccctacaaaccttcttctgggagtttcatccctaacacgtgagacggggacccatcagggactggtgtgaggaaggaggtttccttttctttgttggaagtctccaggcatgcctgccagttagagaggaaaggacaccactcctgcagctcctacagcagatttcggtctccatccatctaggatgaagaagaagatttgagctctttttggcctcaacccatacacatacacacacaggaaggaactctctgattttgcctcttgccagagttttgctggcccaggagaaggctgagctgggagtctgccactttgagaggggctcgttactgggaaagtcacttgcagacaccatgagctcattcttgccaccagcggtataattagaggttgcatcggtacagttacagtgggcgccacgtcaggagggctgcgaggatttcccaggctcactctgtttccttgttgcaagcctgccccttcctgttggagcccgcacggacagctctcccggaacactcgggacggaacctgggtcttcctcatctatatcccatttccctcatgcccggggtctgcaccttgttgaagaccctcctctccatacctttggctcttttagttcggggtggggggcggcggaagcagagagcatcacaacacatttccaaagagaaggaaaagcctagatcattctgctctgtctccttctcccttccaagtggatgtgattttcaaatgttacccttctaggaaaatgctcactgaaccccagatagggcccttttcctagccttccatcccacacatagtcaacgaaagggcagccctgcagaatcttgtgagggaggcttcagagtgggaggagaattaccccatgccccagccaaggagcacgaaggcgaaacccaggacagtcagatgagctgctcagccacagaaggcccagatcctccttagcctgccgtccctctacatcacactccatttcccacacagaacccaaaggctgggcagggacagaatcagcttttcaatatggttattgtgtctctttttttctattttcaatctcaaatgtaacagcagctagaacagagtgtgcaattgcagagtaagactgtatcctctggcagccccggatctgtgtcggggactggcagggaccagccaggaggcagtgacggtgataccagggaggcagcggcacgtgcttttgctccctcctcacgccttgtacccactccctgtacccactccctcatcccaagttctctgcttcccaagttgctgggggctgcccttagccaagaaatgcactctggtggcgattttgcctgggaaaagaaggtggaaggagtgagcgcaagggttggacacaactcagtttagaagaaaaatgagtgaggccagaagaggaggcagagtggaggtggcctttaaactatgggtctacagaacaaaatcactcattcgtgcttcccaactacgccgttcccagcatctcattcctcagagtgaggctgttctcagggttgctgtaggtggggctgggccagggccccccagagtagagactttcagcaaagccatctatactacctgcagggaactgagacacctcactgccttgaaacaagggcttccagtaaatacctcatggcattcatttttcctttttgttctgtgttgaaggtggagaaagggaagtagtggaagaggtagaagtggtttattaatctcaatcggagagagagaagccctgagtccctgtctcagctccagctgacataacaaaataccatagactgggcagtgtaagcaacatgcattttggtttgtttgtcaactttttgtttttattctggaaaacattttcagcatgcatactagtagagtgtctagcatagaattctgctgttcagtatgataaccaccagccatgtgtgagacagagcacttcagactgggttactgacacacattgaaatgattatagtttgcagctattgagttaaataaagataattttaaaaaagaattagcctatttctttttaccttgtaaaatatgactactgggaaatttaaaatgacacatatggttcgcatgacgtattttggacagtgttggcatagacccccctacttatctatgcccatttcaatagtcatcagcttgcggctcttcttgtttcatttacaccctatgcacttaattttttttttctgctttgatgccatctttaccaatgtacagagctaaattttgttgacagcagacatttatttctctcagttctggagactgggaagaccaagatcaaggtgctggctgattcagttcttggtgagaggtcctctcttcctggtttgtagacagccgccttcttgctgtgtgctgggtctgcacgaggcagaaggagagagagcaagagagagagagaggaagaaagagggagaatcagggtagagaatgagagagagagggagagacagtgtgtctctttctcttcttacaaggactctaatctcatcatgcagccccatccttaaggcctcatctaaacctaatcacctcccaaagaccccacccctaatactatcacattgagggttagggtttcaacatttgaatttgggattagacacaatcctaatccaggctccgtccccaccctcaattacccattaaaatttgctttatgggaatgggcctaagtgctcaatgcatgtccatggctgggttgggctaggggaagcctgtatcttcagcttctctgtgctaaggtcaaaaccactgtggggtctactcctggctttcaagccctgggatttgattggctgggcacagacctaaacagattgaggttccaacttctatgctcttccctgcttgtgcccaccagttctccaggaaaagaggaaaagagacatggagaaatggaagagaatatccccaaaccaccaatactggtgcagaaatgctcactagcttgctgattgggagccagatgcaagccggagagaaaaagacgttaagagaccacaggagacattatttttaaacaataaagctgctaaatgtaggctaggctagaggaggacatgagtgcataagaaatgggaatcttctctctctgggccagtttagctattctgagccacgggcagagcatggggaggtgagggtgtgtgctcagccaagtctggtggaagcccagtgcaactgccagacaggagagggtgctataaacatgctgctggaagactcaggaaggaggaggttggtggggtcagaatgtgtactttgtggtagtttcagaaagaaaaatagcacccattttactcatgaatgtctttaatgtgtctactataagatatgtaaacaccagggagaagtctgcctctgggtggctgggacattgatctttgaattgcacaaagaattagaatcatttagggccattcgaaatcacagagtgatgaactctaacttcaacaatgtttatttaatctgcctagtacgagagcaagctagtggatttgcctctcagagtctacacagccaagtgtcacaacttagagggtgagtgcctttgattgggcatgttcctggccagcctcgcggacctccttgcccgattatagccacacctgcctctggactttgctcttggagatccctgtgtctgaaatgccctccctccaaacgtccccaccttcgctgcatccgcgtttagaaggtacccggccagtgagacctccccgtcaattgctttgaaagggcaatcccactcttgcgtgatgttcaaaatagtcaacattggaaaagcagaggtactgaccaatcacagaagctactgcctgatcctctccaccagcatgccctgctgtgtgtcagccctgccaactcaccaacacacacatgcactcactgcagtgcacacatacagacattctccctactccccctttcttaccttttcccctttagcactcttaccactatctgatatatcatagattttacttgtttatttattgcctaccttcccctgctagaatacaagcagcttgaaggcaagaacttttgcttatttgtccctgtgtatttaatcaaaatcagaccaagcgatgatatttgttcaatgtaatcaaaacaatgagagaaaatatacatgaagtgtgaacagcctttcaattttattactgtgtctttacttcagttgaccctgcaaattaagctatttacacctcaaatgtgtgttttctgatatctggatttacagcaaacactcactaatccctaaaaattaacccagtatttgacaaatatctgcaacatatacaatcgcatacattaaattaatttctaagaaataaggctttgcagagccaaataagttgaaaggcagcgtgagttttaggcctgaggccacttctcaacagctatgcacaatatacacattctaagttaggctatgaatgagttagggctgcttacttggtttccgaaaacgatacttctttttataaaagtttacactacagaatccttcaaagccaatgcatataaaataagattccatttacattttaggatcaaagcctacccatgctaggataagatggaagcttttttttggggggggacagagtcttgctctgtcgcccaggctggagtgcagtggtacgatcttggctcactgcaagctccgcctcccgggttcacgtcattctcctgcctcagcctcccgagcagctgggaccacaggcgcccgccaccatgcccagctaattttttgtatttttagtagagacagggtttcactgtgttagccaggatgatggaagcattttttaggaggcaaaatgcaagattgaatgagtgccagaacacagcctcagagagatctgagttcaaattcctgcctcacaggtactagcagaagatactgccttacccgcctgtaatcctggcacttcgggaggccgaggcaggtggatcacctgaggacaggaattcaagaccagcctggccaacatggtgaaaccccgtctctactaaaaatacaaaaattagctgggcgtgctggcatgtgcttgtaattccagctactcaggaggctgaggcaagagaatcgcttgaacctgggaggccgaagttgcagggagccaacattgtgccattgcactctagcctgggcgacagatcaagactccatctcaaaaaacaaaaacaaaaaaaccctcttcatttctgaggagatggatacaagtacctgccttataatgctgtgaagattaagtgggataacacagagggtctggcaactaataaggactcaatgatattagctattaagattaaaaaatcattcttcaattgttgattagatttatggaacaattctgcttactgtactcctagagataatagaacaatatttctagagacaatggcagtagaatttactctagagcaggggttgatagatatcatatatgggtcaaatctggcccaccagctgtttttgtaaataaagttttattggaacacacccatgtgcattcctttgcatattgcctgtgattattcttgcagttacttgtgctctatgacagcagagttgagtagttgtaacagagactgtatggcctgcaaattttaaatattaactatatagccctttagagaaaaagtttgttgactcttgctctagaagcaaatgaatgcaagtcattccacatgttttttagatctggattctagattatactcctgcctaggtctgctctcaccatttgtcttgtaggtaaaagtatctgtcagtccttccacacttgcctgaagccatctagggcagcagctcagtgatgtgaggttatctcagtttccctgcacctgctatctggctaaaaatcatacctagcaagaacctatacaatgtaaagaagtggggcagagaacaaacatcctctgccttgggtgcagaaacattaccctggcttgctggtatcactttcttagcctgagggccctgtagcctgcaggtaccctctttctgctttcgcagacttctctggatgttgtccttcctgctttgctccaccccacctccccctcttcctctgcctttgctgttttgagctcatggcctcttcaagtttctcacccctttatgtataagctcctggcttagatctgcctggactgggtctgcccatagccagtcaagcactgccggccaatgctcacgtaaacacaatgaggacatttagttgagaacactgaggttggggccctttcctttccttttactcctcttaaataccctaaatgggactaaatctccataaatcctgtcaactggaagagttgaaaggctcccgggaaatcctggtttctctcccgctgattgtgctgaagcattttatctaaggctgttctctccttgctatcctagtcccacctcaccctcatgccaatcaatctccctaaacctattttttactgcctcctttgaagcccattccatcacaggcatgcatttccttacactaaaatactttccttgcatcttgctttcacctccccatcttaaaggtgaaatgacatgacctactcccccattcctaaatgactgtacctccttttacctctatattattcaactgttgacttctagataaagtcagaaaattagacctgtatacctagactacataacttttactgccttgctgttcctgaatttcagattgccattatgccagttgattcattgaaagatggtatgagaaacagccccaagaggcagaagccataagattcttgttcaataagttgtgctttataccatatccttccattggagtgatagtttggctgggtatataaaatcctaggttcgaaataatcttctctcaggacactgtagatatttgaggcccctgcatttctgataaaacctaagatgtcagttttatgcttatagctttgcagacaacctgtttgttttctctagagagaactcatgcttctcattctgaaatttcaccaggttgtatttctgtgttggccttttttcattcatcctgcttagtgggccctttcactctaggttgggacatgggtcttcattctccttaaggaaacttccttctgttgagtatttggtcatttccgcctccatattctctgttcccactttctaggactctcagcagctggatactgtccatgcagaccaacagcatgggcatcacctgggaacgtgttgtagatgcactctcaggcttcactccagacctgctgagtcaggatttgttttctaagaagattcctagatgatgtgcgtgcacatgacattttaagaagtgctgctttaattcactgtcaccttagattttgttgaatatgagggcgacatgttagaagagccctcacttcttaccacgactgtccctggactcaacctctcacatcttcccaggattagaaatcagggatgagaaaccctctaactcccaagggatccttctcctttctgtaccaggtcccctctggcatgttcagtctttttctttctacagctcttttcataccatctctaaatagaaacaggtatttcccaacctgaaaaagcttcacttgacccctttgcctcttccagttcccatccaatttctcaattggcttttcctgccaaatttcttgaattcatgcaaaacaggctctacttctgtttctttgcacagccccttccttaactgctggaaacctggcttttgactccctgctctaaaaaaactttttcaaaagtccttaactcagcctttattcttaggtcctcttggcagcattggctacggctggccactgtgaccttctgaaacatgctctgcccatgactttcatgacaccttggtgttgccttatcccactgaagaaagcgtgagaatgccctcctctgggatgacctccctcttctgcccttccctaagtgctcagcccaatctggccgcctcagagagacttttcctaacggttgcattccacattgatctacggactccattcagtgttctccttttggcacacacacacaaagaccagacaaggtatataataatgtaattattggccagacacagtggctgactcctgtaatcccagcactttgggaggctgaggtgggcagatcacctgaggtcaggagtttcagaccagcctggccaatctggtgaaaccccgtctctactaaaaatataaaaattagctgggcatggtaatgcatgcctgtagtcccagctacttgggaggctaaggcaggagaatcacttgaacccagaaggcagaggttgcagtgagctgagatcatgccactgcactccatcccgggcgacagagcgagaatctgtttaaaataataataatagtaataataatgtaattattgcaatgacctttccatctcaccaaccaaattaaagctaccaggggcaaggacacagtctgtgctattgtgactgattgcctcgtctgttcccacagcccaaggacagctagacaaggggctgaaccatcatgaaaaggaatatcgtttcttcatcttcacagagatactggcaaccctcaaagccatgtgcctggggactacatctttcccaagggggtgttttcttcgaattcacccaaaggttctctgtgggcttgccgtgcccctggaacagtctcgtacctcttctgtgccctttcggatatttgtcccagcttgggggcatcttgtcagtgcaattgcctcagtgtctggaaaagtctctcttctcctttcatactcatgatgtgagaacatttcagaggtgactgctcggggctagggtgtagaagcatcttgtgggtatgtagaaggcaaaactcactcctcaaaccagattgaagcccctggctgcccacagacagtttgtggccctttcggaaaaccgagtggctgctttgcatccccgcctacagcctgggcctccttgtctagggcatggaaggaggagaggcagaggaggccggggggaaggcaggtacctcttccatcactcctctgagcaagctcatagaatcaaagagagatccttaaagctgagcgctccctctgcctttcttccacccatccccatcactgcttgcccaggggtctccagctcagtaacagcagttccactgttcctgatgctccagccaggccctgtgggccctccctggcatccccctatctcatccgtccatcacctagtctatgcttctacctctgaaatagacccaacgtttgtacttccccctgtgtattttgccattgtcctggtccagcctcaccaagccccgcctgggcctctaccttggcctgctagctctctgcttccatttctccagccctcaagtccattctaggcagggcagcacaatggtctttttttttttttttagacagagtctcactctgttacgcaggctgggtgcagtggtgtgatctcggctcactgcaacctccacctccctggttcaagagattctcttgcttcagcctctggagtagctgggattacaggtgcgtgccactacacccagctaatttttgtagttttagtagagacggggtttcgccatgttggccaggttggtctcgaattcctgacctcaagtgatctgcctgcctcggcctcccaaagtgctgggattacagatgtgagccactgcacccagctacaatagtcttttaaaagttaatcacataatgggattcccctgctgaaaactctttaatatttgatgttattatgaaattattattctttaaggtgtgatcttgtattttggttattccccctgccctctgaaagagagtgcttctcatttagaggtacatatcatagtattcatataagaaatgatgtgggccaggcaaggtggctcatgcctgtaatcccagcatttttgggaggccaaggtgggcagattacctgaggtcaggagttcgagaccagcctggccaacatggcgaaaccccgtctctactaaaaaatacaaaaattagccaggcatggtggcaggcacctgtaatgccagctactcaggaggctgaggcagggagaattgcttgaaccctggaggcagaggttgcagtgagccgaaattgcaccactgcactccagcctgggcaacagggcgagactccgtctccaaaaaaaaaaaaaaaaaaaaggatgtattggattttcttcaaaataacaccaggtgggtcagggaggtaagaaattggtcatgttgaaacgagtacacagggcttcactggactactctacttttgcatgtgtttgaaaaattttataatgaaaaagtttaaaaaatggcaaagattctgcatttctcatatgactaaggcaaacaaacatccttaccgtggcctgccctgccagcacctctggccttatctcttgctattcccacctggcttccgaggctccaccacgcagccgtccatgcgggctcctttccattcccaccgacgccagggggcgtctcctctatcatccccaaggtatgggatgaagcctcctttctccagtctggctccttcctgctaacctcaggtctcaacttaaaatgccctttccaatgccctgatttaaatttaactaaagtttactttctcactgcaccctttaatttttcatttttgtgcttaccacaattttggtctgttttccccgtgagggaagttccatgagggcaaagttcacagctgttttgttcagtggtgcatacgtcaagcccagcacatgttgccaaatgaagtgagatggcagccacaccctcggtccccctctgaagaaactgccctaggcagttaaaacaataattaaaatgaaaaaaaaaaaaaaaaaggacaacaaatgcaagaagccatgggtccactctgccagatcaacaaatgttaagcatcttttcctttcttttttttttgagacagagtctccctctgttgccgggctggagtgcaatggcatgatctcagctcactgcaacctccacctctggggttcaagcaattctcctgcctcagcctcccgagtagctgagattacaggcatgtgccaccatgcccagctaatttttgtatttttagtgtagatggagttttgccatgttggtctagctggtcttgaactcctgacctcaggtgatccgcccgcctcggcctcccaaagtactgggattacaggcgtgagccaccatgcccggccccttttcatatttttttgatgatcattctctctttcgttaaggaaaataaatttagaggaaacattatagtcttctgtgcttccctccccagacctatcccccttccttccccctaagtaactactgtctgagtttggtgtgtattcagttcatacttttaatatttttatgacaaacgtgcgtatccataaacaatatatggtatggttttacgtgcttttaaaaaatatgtaaatggaattctgtgctacataatattgtacaactaatgttttccactcagtgttgttatatatatgtgtggatgcatatatattataaattagttcatccattgtaactgttatatggcaatccactgtaggaatacatcgcaattgatttattcatccccttaatgaggtacatctggcttatctccagtgttatctttgacaaaaaggctggaaagaatgtacttgaatgtgcgtcccctctgtccatgtctctctgacccattagactggccaaagcaaatgagagagaaccggccaggtggcgaggcaatgggacctttcatatgctgctgatggtgggagtgacaattgacataatcgttttagagagcaatttggcaatatctagttaaggcgaaaatgctcaacccggtgatctaggaattatacctctgtcataaatccttatcaccaaaggtaaattacgtatttatttttctgctcaacggaaagcataaaatatataatattcttttatgatttcaagtttctaatgcagttttacatatattacctaatttgacgttcacaagcatagtagcagtgtcagccccttgttataaacatgggaactgaggccaaagataaggccacagaactgtagtttggtgctgggctcaaatcccagtcatttgactttttgtccagggcattttccatgaccgcaggctgccttgctgtgttttcctgctgcaaagaacatcaacaagctctgggcactttggcgtagatgctgctaggaccccaaccagatacatgggcctttgcgggagcttgtgcccatcccccaggggctgcaagtgttggtggctgaaaggtcacagctgcccttcctcagagaattgcccatggccactagagtggcctcagctggagatgtctggaaacttcccttagccccgcatggcaggggttgctttagccaatggctgactgatgcaggtgtacaaggctggccttattgtctcaagcggggacagctttgtggtaccattcatgctccagagctcactgtgggctgtgggaggacatcagcagagcccgcatctttgcctcgctgcttttcctgacttattctgtgttcctcatgtcctctcgtcttcctcctgggaggattcctttaagaactctcctgcaccagaattctcatctcaggctccgctttgagggtgatggttctttatctttctcatgtatgagaatcaccgtccaggtgtggtggctcacacctgtaatcccagcactttgggaggctgaggtgggagaattgcttgagcccaggagtttgagacaagcctgggcaacatagggagaacttgttcccacaaaaaatgaaacaaagaaattttccaggcatggtgcatgtgtctttagtccccgctacttggcgggttaaggcgggagaatcacttgagactgggatgtaaaggctgcagcgacccatacttgggcaactgcactccagtctggacaacagagcaagaccctgtctcaaaaaagaaagaaaagaaacaccaatagggtttgttaaagcacacatcgctgggcttcccctccactgcctgtttcagtgggtctaggaaagggtccataatttgcatttctagcaagttgatgctgatgatgctggtccagggaccacactttgagaaccactcttctaaggaccctgacataagacagttggtgccaggagaagcaaatgctaagaacgggagtctgcagttggataacccgctggcaatgagaaactcaacactggtgatagaaggagaaatgatagctcctggcatttggtagcgatacaatttctgtgacagcttacagttggaaggggatgtactggcttttgcaatatttctggcattggagcattatagcagagacagtaattataaggattatggaattgagaggctgtttctgagagacactagtgcagcaaagaaagaaatggcgggcccaagtttattaatcaccaattcagagcaaagtgtgaaagtcagaggatctctttggcagtgaggtccttatctcctggagctgtacgatggtgccaaagtgatactcattcagtagaaaccatgctttcagtgcccatgcaaccattctgtttttcatgttcagtgcagtattcaatacattacatgagatattacatactttattataaaataggcttcgtgttagatgattttgtctaactgtaggctaatgtcagtgttctgagcacatttgaagtaggctaggggtgtttggtagattaggtgcaataaatgcatttcctacttacgatattttcaacctaagattgaagcttacctaagatttatcaagatgtagccccatcataaggtgaggagcatctgtatatttaaaagtaatttgggccgggcacagtggctcatgcctgtaatcccagcactttggaaggctgaggcgggcagatcatgaggtcaggagatcgagaccatcctggctaacatggtgaaacctcatttctactaaaaatacaaaaattagcctggtgtggtggcatgcgcctgtagttgcagctacttgggaggctgaggtgggagaatcgcttgaacccgggaagtggaggttgagcccagtctcctgcttcagcacgtggaagtctcataccctcctcgccagagcagactataagccaagcacagaaagacaagcactgtatgatttcatggatatgtgggatctaaaaaaattgatctcatactaacagagagtagacaagtggttactgcgcactagggctggggttgggtagggaagaacgcagagaagggagaggttgatcaaagggtacgatgtttcatttacactagagacataagttttagtgatcaattccactgcatggaaaccacagctaattataatgtatctgtttctgttctttattctggttatttgatctgattgtctatttctgcatcatagctatgttatcttaacaaatatctgtatagtatgttttgctgcctatagagcaagaccttattcattgtacttctttttcaaaaatttgtcagccatttttgggcattgcttttttccatatggattttagaatcagctcattaagttaaaaatctcttgtctgagttttaattgtggccattttatatttatatatcaatataaagagaattactgtactttcaaacttgagccttccccagtggaatattatcatctaagttttttttttttggtgctcttctgtgaagttttatacattttttcatatatattttattaggtttgtctgagtattttatagtttctgttgcaattgtgaatagcaactatttttccattagattttctaattggttattgctggtgaatagaaaagctattggattttgtatggtgactttaaatgtaacttaacttgatttgttctaatagctttgtggttaattctcctgtattgtccaggctgataatcatattgtgtgcaagtagcaacagtttggtctctcctttaccaatatttgaccttgttttgcttcatttctttaatgcattggcctcatgcctccactccagtgttaaatggtagaggtgatagtgtttaaacttttattgaaactgcttttagtgggaatgattttaatatgcgaccattaagaatgatatttgtgattaccttgctatagtatgaaggaaggttcaccaggttgaaaaattttttttctatcctgtcaatcttttattatcgagatggttcaatgtcagtaagcaactcagtgaaaataagagaggtttgcctaagagaccagctgataagctcaaacctctgtcttagtatttttgtgctgctatgacaaaatatctgagactggataatttataaggaacataaatttatttcttatagttctggaggttgggaagtccaagaccaagctgctggcattgacatctgcttccaagatggcaccttgttgctgtgtccttactagtggtggaagtcagaagaccaagggaatgttctcttcacccttgagccattttctaaaaggctaatcccatttttgaaaatggagcccttatgtctcaattgcctcccaaaagccacaggtttttactatactgtggcattggggattcagtttcaatatgaatgttgtaggggacaacatcgttcaaatcacagcaccttcccttctagtggccatctaagccgtcagatgaagctggttacaaagctgattcattcttcctcctgagaacagggggaaaaattactctctaccacagccttaccttttgcaaaaggaaacctcttcataactgccaaggttttgtgtttttagtgagaaagtgtgttgtgttttatcaaatttctcttcaatacccattgaaatgatcagaatgcttattcccttaatttgttaatgtaaaaaattacattaatacatttcccaatgtcaaaccaacctttaattcctaaaacaaattaaacttgagtatattgtattattcttttaatacactaaagaatttgatgtatatatacatttagagacagtatcttgctctgtcacccaggctggagtgcagtggcataatcatagttcactgcagcctcgcactcctgggtccaagtgatcctcctgctttggcctcccaaagtgcagagattataggtgtgagccaccatgcctggcctttcacctctcatttttattaatgaggttggctcttaggtgtttgcttgcttttttatgccattctgggtttggtaccaggtcatggtacttcatagaattaatgtgaaacatgttcatttcctatgctcctgaatagtttctatatcatgggaaaaaactcttccttgaagatttagtagaacttgttcatgaactccctacaatcatgaccttgagccatagtcctgtttgccatcagcttcattccctgcctttgccctgctttgctctgtatctcagagaactgcattttcaggcttgtttaccctcaggcttccaggtgggttggccaatgggaggcactggctcaaaaatggaggaaagaaagtggtgagaagcaaagacattcccttcctgtcctccagcccccattttagatagctgacagcacctgcattgcttttgtggctccagtcactgttctcagcccctgccccaatgggcccagttcccactgaactggtctctgatataagtgcctccaccctttgttcttacagctttctactgttgctaagcaaccctaatgggtttctccgctctatgatcacctatgtaaccaattcctgtattaaactcccctggtttgaaatacctagcatgatttctacgttctgactggttcttgattcattaagaccttgatttgatacctctcctttaatcaattttgatcatgtactttttcttaaggagtcatctatttcttgctgaatttaaaatttgttagaataaagttgtatatattatcttacaattttaagaatcatctttactttagtagttatgttcccatttctgtttcttaagttacttatttttatgtgaatgtgtgtttcatgatcaaaattgtcagacatttgtttactctattagtattttgctggggactttacataaatccttttctaagctttacatcaacttcacaaagaaggtttatattgtgagaaaagggcagcagaaaattactcctttacttgcctgagaccatatgcctattaaattgcaaaactggaactagaactcagatctgtctgaattcaaaactcatactctcctcactttttcagacagcatgaacactctgggtgagattaaaaggatcatcataaataggcttgacattttctacaaagaacacgaatttcttttgtaactggaaaagaagttaattaagcttaaacaaataattataaaaaaatagccttgaaaggagaggatatgtcacatcacggcaacttagccctttgaaatctttgtgaaaggcaggcatatgtcactaggtagccagctgtatcagtgaatcctgctcgaccctgggtttagtagttggttgagccctgggtctccccttcctcaccaggttacatcctctttggaagcagaagtttccccaaaaggtgaaggtcatgttaattaccccaaaggtgcttctcctggcactgttcactaaagtatgctttgaagaaatggccaccttgcctcacccatcatggcacatacggtttggaaattcactctgctctttctccaggttggaagagtgaccggaggtgctgaggttctctgtggagaccaggctgatccctaccggtggtgtaggttgctcattctccttgactggggcaaccagagaaggatcattttctattcctacttcctctccagtcctgagctcagcttctgatggcagaagagccctgaaacctcctaaaatagcctcctgctggagagaggtaatgcaatgcataccacagtatgcatattgatttctatttttggttcttatcaagatttattttgcatcgcttcaggtaatagtgaccttggactcaccgccttccatatttgcagcctgggtcaatgaatcttggtattgacctcaggagccatcaatagctgcttattgtcgagatatttcaatgtcaataagtggccccatggaagtgggaggggggctgcccagcaaacccagcagctaaaaaaccaatcccttttctcccagttgtcatcttggcacagaaggggctggttctaaaattgattaactttcttgcagagagtgggaaaacaaactcccaaacatagcctgaatcctgcaaagggaactttctcagaattactatccattactatgaaaggagagaaacacccatgtgtgttctgtctctgtcttccctccctctctctccctcccgcgtctcccttcttcctgactttcctcccctccgtgtcacattcaatcctatagggacatccacaagactttggaaagagatacctggttactggaacaggtattaacccacccaagcttacctgattgaagatcaggcagattgatctagtaaaaagagtttgccttgtggcatcagacactcctaggagcaaatcctggagtgttatgaccgacacgtgttttcatctgtactgtgggcatactacctaccttgatgtgaagaatggagattctgtctgtatgtgaccggcacctagtaggtgtttcataaatccaagttcaggctttattattatgatacttgccaagttgagaggtcaggactctccacttgtagtttctgctctcactccctcacattctctgccatattcatttattcctgcttccccactgataaaaagatgaaaaaaatggacatgtggctgcgctgaaatcctcttggtatggtttgtatgtgtgtccccacccaaatctcatgagaaattgtaatccccagtgttggaggagaagcctggtgggaagtgagtggatcctggggacaggttttcttcttgctcttctcatgatagtgagtgatctggttgtctaaaagtgtgtagcaccctctccttcgctctattcctcctgttctggccgtggaagacgtgccagcttccactttgccttctgctatgattgtaggtctcctgaggtctccctagccatgcctcctgtgcagcctgcagaaatgtgagtcaattaaacctcttttctttataaattacccagtttcaggtagttctttagagcaacgtgagaacagactaatatctctctcttatgatcaaactgtgttaatctgtctttactggccatgctttcagcaattggcccacttattcatccaccttggtatgcctggcctggctgcatgaaggcacagctgatcttgggcacagttctccaggcccagggcaggggcaggggctgtctgtggcctctgctgggcagcattgtttcagcttccttctgtgtgagtactgtggctccctgttcccgtctgctttctctctcttcctttctttctccgtggtcacctctaagctcccagcagccctggtgatgaatctctcccacctcttctttccctaggccctgccctgctgagggtggcttggactgagtgcaactttggagatgatggagaaggagaaggagaaagcgaacaccctactgtgccttgactctgcctttcggccagagtggtgacttttcccgatggtgatggaaagatgctcacacagaggtgggtagaagatgccaggaaagagaagaaacctggtgctcacacgttgcaaacaggatttcactgagtgctcaaaataatcctgggtggtaggcattagtatactcatttaacagataggaaaacagaggctcagagagtttaagagatgagattggaactctgtctgactccagtctcatgcataattgaacatttgtgttggaaagaaggattctggggacggaggagacatatgaggactttcaagcatctgatttggttaaagagttgtaatagatgcccttgatgtccttatcctgccctggatctgaaattctaagaatagaaacagagagcaccaaacttgctcaagaccatttcctggtacagcagctcagttctcaaagccctgtttcctgtcaggggtagatttaaccaaccatgggccagctttgggcagatttccaaatcctctgcctagtgccacctctggacactggctcttggtgccaaaaatgtaacttcaaagcaaacaccccaaacttagaataatcaggctgaattttaaatttgcatatgcacataaacacttgtccactcactcagtcccctcccaacgaagcagaaagtaaaagatcacgtgagccagcagtaactatgtctaatggcgatgaagcttcaggacagaggcaggagtttgctcttttatttatttattcatgaacgccacaaacacgtattgcacgcttaccatgtgtcagacagggcatgaggacttgatcacaaaagatggaaatcacgtgttaattgttgagtaagcacattttggtttagtgatgagtgtattctgtggataatgtatgtatatgtatatagtacatatatgcacgtgtgtgtgtgcatttgggtgcatgtgtatatatgtatacaatttattaactacagggtttttgctgtcaaggaactcaaagttcaacagagaagacagacatgaaaacaattatgatattttgagaaaaatagctttaatgtaggcaggatcaaagaacagaggagactagtataagaagtgcccaaggctatggggaaattgggaaagacttcaaggaggaagatgtggaggctgagggagcatcttccagatagacaagaggctcaggagctgcccgggcagaaggaacatacattcacttaatcactgcttattagaacatctgcttctggttagaatggatttttgctatcagttaggatgcagaaaattacaagagaccatcactttgattttctttcccccaaacaaaaacaagctacataagttacaaaatcacctcttttaaaatccatcagagagctgaggacataaatttgcaagcccttcctaggacagaagagactcatgactggagggtggtgagaggaggggtaaacccagcatggataggggtacaaagaaacaagccaaactataatcaacttttttattttttattttttttttgagatggagtctcactctgtcactcaggctggagtgcagtggcacagtctcggctcactgcaacctctgcctcctgggtttaagcaattctcctgcctcaacctcccgagtagctgggaccacaggtgcgtgccaccacatccggctaactttttgtatattttagtacagatggggtttcaccgtgttagccaggatggtctctatctcttgaccccgtgatctgcctgcctcagcctgccaaagtgtaatcaacttttaatagtcatgtagaggccaacatgacagatttgtagcccgtggatcccagtcacaattcccacctttacctccaaatgtatggctatggtggaggcaaatcaggagagctgagatatgtccttggtgtgttccaggatgtcaccaagggcaaggcagatgccagcgagaggacatggccagagaagtggaatgaagagacatcaccccagagggaaagccgaactcagtggacccaaaagccaaagcagagcgcgatcagctgtggttcagaagacttgctggaattcagatcccgaatcctgctgcagggatccaaccctcaaaacatttgaagtccatagtgaactggctgtcactagagctgagactcaactcaactcaaccacagaataagttgactcagcctctcacttcagtgagtaattatactttagactatattactatatatgtattatatataattgtaatataattatataatatatgatatataatatataagaaataatatataatatatgatatatagattaagtaatgcatgtatattatatgcatattatatggtgtatatatagtatatatacatatatactatatagtagaaattatatagtatttatttatattatatagtatatatatttcttacttcctactttctacttccttttgtgtgagtatggtggctttctattatattatattatatcttattatattatattatttctattatattctataatagaaatattatatagtatgtggtatactatatgtaatatagactctattattaatactttagactctcctgttcatctatacacaatgtctgaaatataattacaaattacaaagcacttgttgaagcaagaaatgtgacctataatcaaaagggaaaaaagtcattaaagcagatccatggatattccagatgttacgataagccaacaaagatattaaagtaacaattttagatattttaatggattcagtttgagaagtgaacaacatacgtgaacagatggggaatttcagcatcaaactactgaaaaactcagatggttattctaaaacagaaaactactgtatcataaataaagaattcactgaatgggcttaatagcagactggacaccatagcagaaaagattggtgaactttaagttgggccagaagaaaccacctgactaagaacatgacaacaaactaacagatcatctgggccctgggaaaaataccaatatgacctaatatacatataattggagccccggaagaagaggagagaaaatgcagtgaagaaatatttgagcagataatagtcaagaatatttgagggccaggcgtggtggctcatgcctgtattcccagcactttgggaggccaaggtgggtggatcatttgaggccaagagttcgagatcagcctggccaacatggcaaaaccctgtccattccaaaaaatacaaaaaattaaccaggtacagtggtgcacacctgtagtcccagctacttgggaggctgagatggtagaatcacttgactcctggacgtggaggttgcagtgagccaagattgtactactgctctccagcctgggtgacagagagagactttgtctcaaaaaaaaaaaaagaaaaaaaagaaagaatatattaaaattggttaaggacattaacctatagattcaagaggtttagtaatctctaatcagtgtaaacatgtacaaaaccatacccacccatatcataatcaaactgttgaaaacctaaagagaaataaaaactttaaagccaccaactaaaattatattttaaggggaataagaatgagaatgatgagtgactccacacacacacaaaaattagaggccagaagacaatgaatgacatctttaaagtgtgaaaaataaaaactgaattttcaaaaactgaattttcaatctaggatttgatgcccagtgaaaatattcttaaaaaaacagaggtgaaacagaaatgttttcagatgacaaaagctgagaaaattttctcctgcagatttggattacaaaaaatgacaaaaaatgctaaaagaagtttttcagggtagaagggaaataataccagatgggaagaaatgaagaataatgcctgtgggaagaaatgaagagtatcaaaaagtataagcctgatgatattaaaaattatatttatgtgttatgtaaatatatttctaaacttctgtagaagactattgtcaaaagtacaaattataacaatgtattgtggggttttaccttatgtagaagtaaaatatatagcagtgagggcacattatgcagcggtaagagttttacgttgtttgtaaaatagtgcaacattatttacagacaaactgtgttaagttgaagatgcatattgcaccctagagtaaccatgaaatattaacacaaaggtattactgaaaaaaaatcagtggaagagatgaaatagaatactgaaaaataattaatccaaaaagctggcagggagtggagaagaggggaacaaaaaataggacaatgagaaagcaaatattgaaagtagacttaaatttaacaatatgaataatttttaaaattataaatggacctaattctcaaattaaaagacagaaattatcagaatggataaaagcaaggtctgactacatgctgtttctaagaagcatggtttattattattttttatttcaatagcttttggggtacaagtggtttttttgttacatagataaattatagaggccgggcgcggtggctcacacctgtaatcccagcactttgggaggctgaggtgggcggatcatgaggtcaggagttcgagaccagcctggccgacatggtgaaaccctgtctctactaaaaatacaaaaattagctgggcagggtggcgggtagctgtaatcccacttgctcgggaggctgaggcaggagaatcgtttgaacccaggaggcggaggttgcagtgagctgagatcatgccattgcactctagcctgggctacagggtgagatgccatctcaaaaaaaattatatagtggcaaattttgagattttagttcactggtcacccaagcggtatacattgtacataatgcgtagttttttccaatccctggtcccccttccatcgttccccttctgagtctctttataaagcctacatacaactcatatgccttcatgtactcatagcttagctcccacttataagtgagaacataaagtttttggttttccgctcctgtgttacttcgcttagaataatggcctccagctccatccgagttgctgcaaaatacattatttcttttgttgttgttgttgttgttgttgttgttgttgagacggagtctcgctctgtcgcccaggctggagtgcagtggcatgatctcggctcactgcaagctccgcctcccgggttcacgccattctcctgcctcagcctcccgagtagctgggactacaggcgcccgccaccacgcccggctaattttttgtatttttagtagagacggggtttcaccgtgttagccaagatggtctcgatctcctgaccttgtgatccacccgccttggcctcccaaagtgctgggattacaggtgtgagccacggcgcccggccaaatacattatttccatctatttaatggctgagtagtagtccatggtgtatatataccattgtttccatccatttaatggctgagtccatggtgtatatgtaccatactttctttatccactcattagttgatgggcacttaggttggttccacatctttgcaatcgcaaattgtgctgctataaacatacatgtgcaagtgtctttttcatataataacttcatttcctttgggtagatacctggtagtgggattgttggaaccaatgatagatctatttttagctctttaaggaacctccacactgttttctatagaggttgtactgatttacattcccaccagcagtgtatataagcgttcccttttccccatagccatgccaacatccattgtttttttactttttaataatggccattcttgcaggagtaaagtggtgtctccttgtggttttagtttgtatttccctgatgattagtgacgttgagcatttttccatatgtttgttggccctttgtatatcttaagaaacatactttaatataaaatcatgaacaagttgaaaacagtaagagatatcccaatgcaaacaccaagtatcagaaagctgttgtgcctagagattatcaaagaaggccaggtgatcactcactcctgtaatcccaacactttgggaggctgaggcgggcagatcacttgaggtcatgagttcgagaccagcctggccaacatggcgaaaccccatctctactaaaaatacaaaaattagtcaggagtggtggcacacacctgtaatcccagctactcgggaggccatggcgagagaatcgcttgaaccctggagaaggttgcagtgagccgagatcatgccactgcactccaccttgggagactccatctcaaaaaaaaaaaagattatcaaagtggacttccaaatgagaagtattagcaggatttcgtaaccttacatttcatattaataatattaataaggggtgactttgtcaaaaccatctaagagccttaaacctgtgtgtagctaattatagaacttaaaaatatgtgcagcagaaaatgacagaaataaagagagaaacagacaaatacacaatcatagttgaagattttagtgccccttaatcattcattgccatgacaaataggcagaacatcaataaaggacacataaggcttaaacgatgtcattaaacaacttgatatagttgatgtttatagaacacagctacactcaacaattatagaatgcacatggttttcaaatgtatgtgtacgttcaccgagactgaccatgtgctggatcaagaaaaaaaaaatctcaaaggttaaaaaaagaaatatcacaaattatgttcactaagtattatataattaaatcataaatccataacaaaattctagaaaaatctgcaaatatttggaaattaagcaatatgttttcaaataaaccaccggtcagagaaaaaaaaagtaattagaacatgttttatttatttatttttcttttcttaatttaatgttttatttatacataatagatgtacacattttcaggatgcatgtgataatttaatagattcatgtatcttgtaaatatcaaatcagtgtcattggagtatctatcaccttaaatatttgtcttttatttatgctagaaacatttgaattattctcttttagctattttgaaatatataactgactattgtaaactatatttaccctgctgatctaacaaaccctagatcttacttcttttatcaaactatatatttgtacccatgaatcaacctctcttcataccccatcctttccttcccaacctctgggatatctgaagaatcatatcaattatagaaattgattagattcaatctactctctatcttcatgagatctaatttttagctcccacatatgagtgagaatgttcaatatttgtctttctgtgttttgctcattttgcttaacctaatgatctccatttccatccatgttgctgcaaatcatgaggattcattctttttaatggctgaataatattctactgtgtatatatacgttaaaaaaatccattcatccgttgatgggcacttaggttgattccaaattttgactattgtgaacagtacagcaaaaacatgggagtgcagaatctccttgatatattgattttctttcttttgaattccagtagcgaattactggatggtatggtatttctattttttgtttttggtagcacctccatacagttttccactgttatgataatttatgttctcaccaacagtgtatgagcattcccctttctcctcattgttaccagcattggttactccccatattttatataaaagccgttttaaatgagatgagaatatatctggtggtagttttgatttgcatttctctgatgattagtaatgttgagcattttttcatatacctgttggccatttgtatgtctttttttgagaaatattagattttttgcccatttttaaatcaaattctttggtgtttttatcttttcttttcttttcttttcactattgagttatctgagctccttacatattatggttattaatctcttgtcagatggatagtttgaaagttttttttctaccctgtgtgctgtctcttcactttgttgattgtttcttttgctgtgcagaagctttttagcttgatgtaatccctagaaaatattttaaattgaatgtaaatgaacacacaatatatcacacgttgtgaaatgaagctatttgagggttctaagggaaatttacagctttaaatgctcataatagaaaggaagaatggtttaaaatctacctgaggaagaaaggaaaaaatgcaaattaaacccaaactacaaggttggaaataataaaaacacaagcagaaatccgtgaaacagacaatggaaaagcgatagataaaatcaataaggatgaccaagaagcaaaatgtttgttctttaaaaaggctaataaaattgatgaagcccagaaagactgattaaaaaaagaaagaaaaaacaaattgtaaatatcaggcactaaagagacatcatcactacagatcccatggacaataaagggatgataaggtaatattatgaaaattgtatgccaatacatctgacaacctaggtgaaatggatgaataccttgaaaaccacaatttgtcacaataaaacagaaaacccgaagagtcttacatcaattatagaaattgaatttaaaaataaacccttcccccacataaagaataagagtttcagatagttttactagcaaattctctcaaacttttagggaagaaaaaaatacccatcttacaaggatggatcatgagggaattctccccatctcagttcatgaggtcagcatatccctgataccaaaacctgcaaagcaatttcaaacgaggagaaaattataaaccaacctccttcatgaacgcagacagaagaactccctttaaaaagcccagcaaatttaattcagcaatattttatttatttatttatttatttatttatttatttatttatctatttatttttgagatggagtctcactcggttgcccaggctggagtgcagtggcgccatcttggctcactacaacctccgcctcccgggttcaagtgattctcccacctcagcctcccgagtagctggaattacaggtgactgccactatacctggctagtttttgcatttttagtagagacggggtttcaccatgttgcccaggctggtcttgaattcctgacctcaggtgatctgcccgcctcagcctcccaaagtgctgggattacaggtgtgagccacaatggccagccaaattcaaccgtatttttaaatgataatgttttaataccaagtgggtttactccatgaacacaaggttgatttagcatttaataatcaactaatataattgatcacataacagaatgatgaaggaaaaaacacttggtcatcttaatagatgcaggaaaagcatttgacaaaacacaacctccattctcgattttaaaaaaaatgcggcattttaaagatcaaaacaacacactttttcaatttaataaagggcatctatgaaaaacctgaaggtaaatcatacttaatggtgacatattattatgcttttattattattatgatattggaaagaaggtaagaattctggttgggcgcggtggctcacgcctgtaatcccaacactttgggaggccaaggcgggtaggtcttgaggtcaagagattgagaccattctggctaatatggtgaaaccccatatcaactaaaaatacaaaaattagctgggcgtggtggcgggtgcttgtaatctcagctacttgggagactgaggcaggagaatagcttgaacccgggaggtggaggttgcagtgagctgagatgacaccactgcactccagcctggtgacagagtgagacttagtctcaataaataaataaataaataaaaccgaattcctacttttacctctgtattcagccttgcactcgaagcctggccagtgcaacaaggcaagaaaaagaaatgaatactataaaagttggaaagaaagaataaagctgtttttattcacagataatgtgattgtaaatgtagaaaattctaataagtttatataataattcctatgattaatatgtaaatttagcaagattttaggttacaagagcaaatatacaaaattcaactgatttctatatattaatatgagcaattggagaataaaattgacaagcaataccatttaaaatagcatagaaaaaatgaaatatctaggaataagtttttctgaagacatacaagacttctatactgaaaactcaaaccactgctgagagaaattaaggaagacataattagatggagagagaatgccccgcttatggattagaagagtcaacatttttaagatggtcattcttcccaaatcaatctatacattcaatacaattccaatcaaaatcacaacagaattcttaatagaaattggcaagctgtttctaagatttatatgaaaacagtaaaggcccagaagagccaaactgtcttgaaaaaacaacaacaaagtttaacccaaaaatatgaaaacataaaccctcaaaagactggtacaagaatgttcaaagcagcctcattcttagtagcctcaaactgaaaacgacgcagatgtccatcaacaggagagtagttgatcaaattgcagtacattcatacaatgaaatacaactcagtgatttaaaaaacgaattatggatgcacaacaatggcgaagaatctcacggaccttatttgaacaaataagtccagacataaaacacagtatgattccatttttaccaccttcaagaacaggcaaagaaaatgtatggtagtagaagcgaagaaaacagttgcctttgggtgagagtgacatggattgattggcaaaaggcatgagaaaaatttttgaggtgataagtgttctatatgttgatttgggtggttgttgcatgggctgtatcaattgccaatatccatcaatttttttttctttttctagacagagtctgactgtttcccaggctggagtgctgtggcacactcatagctctgcaaccttgaagtcctgggctcaagcgatcctcccacctcagcctcctgagtagctggggctacttttaaattccttgtagagaagaggtctcactatatttcccaggctggtctcaaactcacaggctcaagggatcctctagcctcaggttcccaaagtgctgggattacaggcgtgagccactgagccctgcccaaattgttcattttaattttacgtagcttaaacctcagtatcagaggaagaagggaggaagaagagagaaggaagcgagacgagggaggaaagaaacgtaagagaaatcccaaccaaaagcaatatatgaaccttgtttatcacctgattcaaagcaatcaactgtaaaaacacattttgagccaatcaagaaaaattgatcatcaactgggtaatagaaggtattaaacaattgctgttatttttagtgggtatgaaaaaggtattactgtcatttgttagaaatatatatggaagtatatgaaggcaaaataataagacgtctgagatttgttttaaaatacttcagccaaaaaagtggactggaatagtgaagcaagttggcaaaatgttgataattgttgaagctgaatgaaggggatatattactacattatctctgttgtgtctgtttacaattttccactatacagtttaaaaaataaaatttaagttaaaaattagtcatcgattaggtcatgtcactcctctgttcaaaatcctccagcacgtctcatctcagagtaaaacccaaaatctttgacatgtacacagaaatctgtcagtgggtcgtgaaatcaatctagtgcatcatgatcagcattttcattatatgaaatggaacagaagagtgagaaagaaagatactagagaatattacatgtatagtaaagataggaatttctataggaaattgtttgagtgcctgtttgtgtatgtgcatgtgtgcgtttctttcactgaattgtggtgaaaagtttgagaaacagctctacctcatctgcccccggcccctgcccctcctgtctgtctgctttactccccaccctctcttccctcctgccctgcaaacccccttgccgtgcatccatcgtgccagttcctgcccgggcatccgcatggctcccttcctcatcttcatcactcagcaagtgagcaacctgctcacttgttgccttaccaacgaggcttccccagtcattgcattcagcaccactctctagcctccttcatcagtttgattattcaactccatgcacttactacacttgggtttacttgttcaatgactctgcctaccccattcccattcctatcccagaatagcagcctcatgagagcaaggggttcacttgtcttcttcgctgtggtacctccagcaccaagaatattgtttggtgcattctaggcattcaataaatatttgttcagtgaaaaaaattattgaggtcttctttgtgcccaggactgtgctcagagctggagaacgagcagtgaacagggcagatgtggttcaaaccttcggggagcagagtttgcaggagcagcaatgttagctgtgggccaacatgtttcagctgtgtgaggcaagaccatgagccaatgtgtttcagctgtgcgaggcaagactgtggaacaatgtgcttcaactgtgcaagggaaggccatgggatgacgtgtttcaactgtacaaggcatggttgtgtgatgtgtttcaactgtgcaaggcacagctggcagaagcacaagacctctcccaggctctctgttgtgagagcctacaacagagggacttaactgtgtgcatgtgtgtcatgtctgttgtgaggtgtgtgtgtgtggtgtatgtgtgtgtatttggtatgtgtatatatgtgttatgtgtatatatgtggtatgtgtttatgtggtatgtgtctgtgtggcatgtgtgtatatggggtatgtgcgtaagtgtgtgtctgtgatgtgtgtgtaagtggtatgtgtctgtgatgtgtgtatgtgagatgtgtgtgttgtatgtctatgttacatgtgtgtcttgtgtgtggtgtgtgtgtgtgtgtctgtgtttatggcaggtgggaggaaggatgccttcagggagaactttcctgagaaaaacatgaaaacagacctatagatcaataaaaagacaagcaatacaattaaaaataagcaaaagatccaaaccaatacttcacacaagggcatatttgaatggccatgagcagatgaaaaagtgttcgatatcattagtcagtagtgaaattaaaattgaaagcacaaggcaataccactgcatgctcatcagaatggatagattaaaaagaccgaaaatgccaagtgttggcaacaatttgggaggaacaggaacccatatgctgcctgtagaatgtaaaacaatacaaccactttgggaaactgttggtttctaatagagttggatgtatacctactctttgatttatcaattcctaggtatttacacaaaataaatgaaaatatgtgttcatataaaagctttgtatgcaaatgttcatagcaattggattatcaacttccaaaaatggaaacaacttcaaatgtctatcaacaggagaatgaatgaacaaattaagtcttgtacattaatgtaatgaaatactagctgggtgcggtggcttatgcctgtaatcctagcaatttgcaaggcccaggcaagtggatcacctgaagtcaggagttcaagaccagcctggtcaacatggcaaaaccctgtctttactaaaaatacaaataataataataataattaactgggcgtggtggcgtgttcctgcaatcccagctacttgagaggctgaggcaggagaatcacttcaacccaggaggcagaggttgcagtgagctcagactgtgccattgcactccagcctgggcaacaagagtgaaactccatctcaaaaacaaaacaaaacaaaacaaaaaaagaaatactactcagcaacaaaaagaaacaaattgcagatacacaccatgacatgaattaatctcaaaagcactatgtggagtgaaagaagctgccaatcacaaaagagcaaatacgaattgattccacttatatgaagttcaagaacaggcagcactaatctcatagtggtagctaaacaaagcagtgatcgcctggtggtaggacattgatgggaaaggaacacaagggaactttctgctgtggtagaaatattctgcatatcttgatttgggtgaaggttgatgaaagcattctatatttcttcatttgggtgatggtaatgtgggtataaatatttgtcaaaattcaccaaatgatacacttaagatctatgcattttattttatgtaaaatatacctcacctctctctcatgggaaagaaacctaaggtactgaaggctgagtagaaattagccttgggtgaaggggagaagagcattctaggcagaaggaaccatgtttgggatgctcatgaggtgggtaaggtcttagtgtactccaagaacagagaggaaccagaggcgtttggagaatgaggagaaaggagggcagtagatgggctagtgtgtaggatggatgggacttggtcttgctaaaccttatgggccaggtaagaaaaagaaaacatgatcagatgcaaggaagaatggatgggagagagcaagaggtgagaagggtgagacctcttaggaagttactacactcatccaggcaagacctggttggggattgggctaggcaggggcaggtggaaacagagtatcttattcttattcacttttggcagtacagtcatattttggtgaaatgtgttttgcaaccaggtagagaaacgagagcacgtttgtaagctggagatccttactcactgttgtgagaagaagggatgtagctggtggtgaggctgggcagaagggcaggccaatcctgccaatcactcagtggaacctttttgtgttaattgcctcttgctccaaaacaaactaccccaaaattgagtgacttaaaagaacaaccactttagtagctcatgattttgtcatctggattgggctcagctgggtgactattctgctgatcttgctggtctggtggtcttcagtgtactgagctcagctgggactgctggcttggctgggcctttctctctttccatgttctccatgttcttttccatgtggtctctttagcaggatagctagatcttttacatggcgactcagggctcccaagagcacaaagcagaagctgtagactttcttaaggcttagtggggcgctgccacattgtattggtactgtgttgattgtattgtattgtattgtattgtattgtattgtattgtattgtattgtattgtattgtactggttaaagcacatcacaaggctagcttagattcaaggggagggggccacaccaaggtcattaatgtacagactattacagccacttaaggagccatgtgaccttcgacaagttattcaacctctccaagcctcaattttcttatcttggaaatgggaataatcctatcacttacttcatagtgtcctcgttcagattagataaagtaacgtgcaaagagtgtggcagggtgcctggcctagagtaatgatggtcatcatcagtgcattgctgctgctgctgtcactgcagaaatgtgtgtttacggagcccctacaccgtgcaggccctgccctggccttactcttctgaaggaaagtctacccctacttagtgctgggagcaggcggctgcctgagaagaactcttacgtgtctggtgtctcttgctctctgccagcatccattgcccagtgagaaaggcccattaatccctgcaatgccaggcgaggagccagccaggctctgccctcctcctttccctcccatcttcttgttttctttttgttaattaaatatgggtcagctattgacacgaatgttgactgctgccatgccaacccagagagcatcctggagggacagtggcctttgccctgcttccagcctccacctcaggtctctgtcccctgtgcctgtgcctctctctctctgtttctctgtccatccgtctctgtctgtctttttcatcagtccccacagggtgctcttctatgtttccagccaattggcccctgaaaagagcaggacacaaggccacctcatcgtccaggcaggtcttaaagtcctatcgcctcccaacattttcctaatgttaaaaggtcccttagatttcctatccaccatccctatatgtttagtacctatcagtcagttgattaaatgcataacaatggaaagttactatgaattcactaatgcttttaaatgaaagcatttttttcgtcctagccagaataagggatactgtggcatatatctgagagacatatcattgattctgatttcaggcactatttggcagcctttgtggattcggagcctgctgccctgccccctactctttgctgtaattctgggatgcccacgatgctctgtttacagatcagcaccttgtatttacccctgctgcttaaagcggggtccacagaccccattgtcagcatctcctgggagcttgttagaaatgcagaatcttgggacccacttcagacctactgatcagaatctatattttaacaagttctccaggtgattcttgtgcacattaaaatttcagaaggctgcgttagtagagacggctaggggtcacctaccgtccgtcaatcaaccagtagttgctgagtgcagaggctttggaaccggcaacctgggtgtgaatcccagctcttccatgtggcacatatgggggagattcctccatgtgttgggccctggggtgggtgccagaaatatgatacagggaaaaccaggcatggatcctgttctctgggcatctaccgcctagtgggggagacatgtgctaatgaatgtgaaactgtaaggctctgaaagaagtaaacacagatccattcattcactccattcatttaacaggtgttcattgagtacctactccatgccggatactgctgggcataggagatatgagagcatatacaatagaacttgacctaccctgggaagtcagggagggcttccctgaggaagtgacacttgagcagagagtgaaggatgcactggagttcactgagagaggatggagtgggggtggcacaaggttttatcactgaaagtgtcaaattgctgaaaagactagtgttttgaacctgagaaatccccatgggatacagcaccaagaagtcactgttgacgtccgtgggagctttttcttgggagtgattggactgaagccaggttggatggttggaggcatgtgagtgggaggtgaggaaaaagaaagggtaggcaaagtcgttcctttgaagcagtttgcctgggagggaggcagggagaaggcagatagttggtatgggtacaggggtgggttttctttgatttattctttgtagctagggaaactgcttttgatgagctatgtaaccttgtgttttgcttatcatctctgaggccagtttcttctgtctctgtataatgcaaataatagacacaaaataaaaaccaaacccgctgtaaattaatgatgttggaattcctcttagaaagtgaagtgctcccgtttggaggaatgctctgattagaactgcttgagggttaaagaggaggcctcagaggctctgggtgtgggcagagctgacttgctgagccccaggaaggaaggtggcagcaactggaaagagaaggaagcagagaggggtgggcagtggcaaatcatcaggagaccaaaacctctgggactgatgaggaaggcggccaaccccagccttcccccaatattccagcaaccttctctgctcacaaactccttggtgcaagtggacattttttgtggaggcccttgagaacctgtggatttccatgtctgatctgatgagaatcaattagactgaggcagcccaagaggggcaggacccagacacagggagaggtgtgcagaaggaagccccagcagttctcagcaatcacagatagggctctttgaatgacagggatagagaaaccaagggtctggtttatccagttcttcaaggggcatggagaccactgctaacattggattagatcctatgcagaggcactgcactgcaaagctattttatgggaaatgacataaaataactttgttaccttcattcatgtcactagattaacagtcacatattaggcacctgctaggtgccttatgcactgttgtgggcatcagagttgcaacattttatgaaatagacttgaatccttgccctcctggagcttacattgtagaagagggagtcatacaataagcaaatgaaaacacatagtatattacatgatgataggagctagggagaaaaatagaagagatttgtttatagtttcatgaaggaagagggacagagagtaccagagctggatgtatatgttggggagagggaggttcatttaaatagtgtggtcagggaaggccttagtgtagggtgaccttgatcaactctgaagaaggtgagacgtgagccctggggacatttgaaggacattgaagaccatttcagatagatgaaatttagcaaaggggtttccatccagctgggaagatgagacttactcaagcatcaccaacctggtcttcactatccatatttctatcacagttatcatagaaatatggacaatgaaggccaggctgatgaatgacaggcttgtttcagatggaaatgaggaattcattgggaactggagcaaaggtcatgcatgttacaccttagtgaaaaacatagctgtattgtgtccatgccctaaacatctgtggaagtttgaacttcagagtgatggcctagggtatctgatagaataaatgtctaagcagcaaagtgttcaagaagtggtttggctgcttcttaacaacctatgctcagatgcaggagcaaagaaatgacttaaagttgtattttatatttaaaagggaagcacagcataaaagtttggaaaatttgctgcctagtcatatggcaaagaaagaaaaagtttttttgggagaggaattcaagaaggctgtggagcaactacctgctagagatatttgcataactaaaagggagccaagtgctaatatccaagacaatggggaaaaggccttgagggtgtttcagagacctttggggtagcctcacccatcacaggcccagaaccttaggaggaaagagtggttttgtgagtcagggctagggccccactgccccacaggcccccaggatactgatccctgcatcctggctgctctggccccagttgtggctctaaagggcccagacacagctcaagccactgctctggagaatgaaaaccataagccttggcagtttccatgtggtgttaagcctgcaggttcacagagtaaaagagttgaggcttagcagcctctgcttagatttcagaggatgtatggaaaacctaagtgtctaggcagaagcctgctataggggtggagctctcacagagaacttctactagagcagtgccaaggggaaatgtgaggttgaagcccccacacagagtctccaatggggcactgcctagtgaaactgtgagaagtggtccacatcctccagacatgagaatagtagatccaccagcagcttataccctgtgcctggaaaagtcacaggcactcaaccccagcccatgagaccagccaggggtagctgtaccttgaaaagccacaggggtggagctgctcaaggccttaagagcccaccccttgcaccagtgtgccttggatatgggacatggagtcaaagaagattattttggagctttaagatttaatgactgctctgctgagttttgaacttgcatggggcctgtagcccctttcttttggccaatttctcacttttggaatgggaatatttacccaatgactatatccccattgtatcttggaagtaaagaacttgcctttgattttagaggctcacaggcggaagggactttcctcatctcagatgagactttggacttaaacatgagatttgggaggggccaggggcagaatgatatagtttggatctgtggcccctcttaccaaatctcacgttgaattgtaattcccagtgtgggaagtggagcctgatgggaggtgtttggatcataggggtggatccctcatggtttggtgctgtcttcatgattgtgagttgtcgtgagatctgctcatttaaaagtgtgtggcgtctccctcttaattatctctccttttcaccatgtgatgtgcctactccccctttgccttccaccatgagcgtaagcttccttagccctccctagaagccaagcaaatgccagcaccatgtttcctataaagcctgcagaactgtgagcctgttatacctttctttcatataaattgcccattctcaggtatttctttatagcaacgtgataatggcctaatacatgacttgaatgacagctcatcctcttgacagcacaaacagcccctcctctgagaagccttccctgacttccctctctccatcaagacctgcaggccccttcctccgggcacctctataccttgtatccaccactatcagcgcttgtcttgctgtgctctattctttatttttacatgtgtctactctaggaggctgtgtgcttggggcttggctagtccatatatttgttattccagtacccagcacagggctgacacctagaaggagagcatggctagaggtgggcagggagtggaaggcaggctgaagagaggatttgaggcctgattggaggagacaaggaaagtaaatctgggtgtgctggataagatggttttcagaaggagaactgggcaggaaatcaactagcaatgatgctaacagacacagcaatggggatagtgggaggaagtttgccctaatcatgagaagggagaatgaggaagaaaggagaggcaggagagacttcaaggagaacttgctgcttaaccacagagtgtggaggagagggtatcactgatgatgacccaagcttggatgcttggagaaaagagaatgaggatcgcaccacgttacgtgcactacatggtttatctcactgatcccctctacttgagattgttttcattttactccctggagagtgactcttaaacgatgttcctgacatcggaatttgaataataacattaatataacagggcagtccaatggctattaattcacattagtctcaattctgggtgcctttagtggaatctagaaatttgtatacaaacagtcagtgatgataagacacctgctgaacagacacatctaaggctggattcataggggctatgaaataataataatgataatgatgagcctacattgccagagtacattaaaatcagagtaattagttaatttgaaataacaatacccattaagatcattaagaacaccttaactcgatttagtatcccagctgtaagcttctcaaaggttttctcaggaatcatctaattcagattcggaataagatgaaactccctattcctttccttcatttgatgagcatttattgagcacctactagatgccacattctcagctgggactgggatataaagagaaacaggacagggccctgtcctcggggaccttgttctttagggaaacagatggccctgggaatggtcagtgatcactcagggtggctggggagtcccgaggaacacagaggaggggaggtcagtgtgtcctagggtgagggagcctgcagcccagagaggctgaacaaaagcatagctaacattcatcggtgctgcctggaatgatgactgtgaagatgagctaaagtgaccctgaaaaccaagcttgtcaacctgtgtttgccatgaagcaggaaattcagaggtatatttcctggtggggaggatggagccacagttctggacccttctctttcattacactcatcacatcaaagctccagaagttgggttcagagtctggacctccctctttgtgaataaaaagacaaaaagacctctgaggagaccccattctctagggggcctattgaggaagtgctggattgacatgtgagacccctccctgctgggatctggttaaccaatttgctcctgagtctgtttttcagatgtgcagccacctcccgctagcaggcttgagaagtgagggtagcaggttctaggttcagggaagagccagtgcaaaaaccctggggtttccatgttccaaagctgttggagatcagcgctgctgaactcttgacaaggtagaggttggtccaagaggggcccgtgggaagagtttggaccccattctaagggcaatgggaaggcactgaaggatttccaggggagtgatgacatgaaaacatttacatttttataaataatccctctcgtccctgagtggaggctggattggaggtgagtctccagatccctgctttccaataagactttctgagatgttggaagtgtttgcatctgcagtgtccagtgcagcggcccctgtagggtatatgaacctaagagcaataacttattttcttagaatgacactgtggcagcacgtctaaatgtgtgtcccaagctagggaatctggcgtggccaactcgaagattcgttctttacctgtgaggagcatctgagcccccagtttgtcccgtggaacatgggctgtacaggagattgaggccccgagttttgggatcaatgaaggtgccaggtggaggtcatttaggggagggtgttaggtgaaatgctatggagactgtgtaccgtttgcaggcagttggggttttcctggccagcccgacgccactgtactgtagggaaggtggatgtgttgtcagcctttgctactggactctctctcctgtatgtaagcctctaataatactccatgtcttgtttgctggctctgggtctcctgtttggcctcttgaacctggtgccttccctacggaggttaacaggggtttggcacaacagcccctcattcccagtggctgtggaacagctgaaatggggctcgtgtgactggggctgagttcagctagctgatttaaatgtaaatacccccatatggccagcggctgtcctgttggacccaactccagaccttcctctaggagcggggaggactggaggtttcccccaaatcctggttgccacgcccacccttgtcctcatctctagcgtcatgaggatgcattctgagaagcaggatggctgggtcaaaggggaggaatgcttttaggatttctctgttcctattttcaaagcactctccggaaaagctccacgcaagtactctgtcactgtggcgactgtgagggagagccactgccggtatcctcgacttgggaatgaccttttcttctcttgccttctccagcttgaggggcgggggtggctgatgaaggagctgacttcaaactagtcttggtggctccttctgacctccccaacgatggccctccctggggtatccattgcagcccctaagtactcccaaacccattttccagaattaaaaaaacaaaacaatccatgactctatcttggattcccaggacacagatcagtgcttcctctggccaggaggggcctgggctcatcccaggcgacgtgggaggagcaagcttgcagttcctcctcctttctcggctccacccacatgatgggtgtagctccactgcatgatttctcaattaacaaccccaatcctctggattaccgtttctcatttgcggggattattagcagtgaaaatactaacaatcatgataaatattggctgcagccatccacgctgccccgagcccctgctctcccactccgtgtaattaaaaagcgagccaactgggcaaataaaaagcccagatggcccctccggcctcagagaggacatgggaggatcatggaccccaaataggccattaatgccattccagagccaccagcaaatatggagcaaaacaaatgaagctcaactgcaaagggagaagcctaataaatcttgcccaaagtggctttcacttggggcctgaggctgtaattggaggggtgatggcgggagcagctccctctctgcctttgctctgaccactgggtcctgagctccccccatgcaggcagacacgacagacacctctcatttcccatttgtgacccaaccctgacctgtctttggggctctcgggacagcctggccctttcttccttccgagtccccggctgcatgcttttcattccaacttcagaacttcctccgctgtcagcctgatctgccccccgccttgcacctggtctgttcatggccatgccacccccagcttcccccttctcctacagtcttccctgtctcccctctcctatgccccttcctttctgcaaagctggtctccgaagtcactgcctcccagcagctttccctcatacagcccaccttttgcagacgatttattcacatggggcctctctggggtctgggaggagctgcaccctgagctccgcccttgaatgactcatgtgaccctaggcaagtcaaggcctctctctggtcctcagtgaccccagcggcagaagggtggctttctcagaagagcgttttgaggattaaacaagatactccaaacaaaggggcctacacagaggtggcacgtaggaggcatagaaggtatttaactaaagttaacggaatggctctcttaccccacacctttccacacttaggggcccagtttgcatagaacatctagttcatattgcagtgggtatattctttgttctttaactgtatcttcccattagactgaggtgatcactccttctatttgtccttccttacaatagctgaaacacgggtccacgtgctggggctgccaaattcgtgatgcaaaaagatgagatggtgaattattgggataagtcttctttctctttcccccggggaagctgttgagccacactcgcagctggctgggactcctggagagttatttacgagggtggctacgaggggtctatgtcacttgcttctggtcttcgggcctgatatttgggcagcaattgttcccccagctctggagacaataaaattaatttggcttccaaagcagtatggtctgagctgcttctacccatccccatccccaccacacacacacttccctggagggcaggcttcccttacatcttgttctactccatctgcctcttgcagttgagtttggggtcttctaaccttgcctaagaacgcagaatatgatctagatttccaacaatggggagtttgttaaataaattacagtgccatatgcgcacttatgatatattttcaatgcaaaaaaagcaggttgcaaaacagtttgtgaagtaagaacctattttggttagaaaaaaatttcccaactatagatgtatgggccaaaaattgtctggaagaatgactgtacaccaaaatgttagcaatagtttttctgctttttttaaaactttgtttcctgagtagtgggctaataaaggattttgacttctttcttggtgcaaatctgcaattttctgatttgtttacaatgaacatgtatctctcctgtctcaactaaataaacaaataaagaaaagcaccaccaggttctcccaggccttgtttgcatacatttgcatgctgtccaatcaaatgccatccatcaaagctccatttcatcagccctcaagaattgctgaggctgggcttgccttcttggttacgaggccatgacgggcagtcgctcagccctccttaggaagacccaggcacacccctgtctgagagctgaacccagcctacctacctcgccccccgcaacaagtctctatctagcatcccagctcctgtgagactacaatggtgacaccagcccagaggcaacaacagctcggttgtcacatttccaaccttgaaggcgtcttgattccactcggttggcagcattttcatgttattctcagtgctttgaccttaagtggctgcttttcctctctttctctttcccttgtgtttcgcctccccctcctcctctcctctctcctgactgtgattgcctgagccaggcatctgagctgtctcgagcttgcctcctatttttgtactttgtgaaaccaggggatacaaagggctgtgagtaccgcgcagctctcagtcctgggacgaggcgtctgtctccttgctttggctgggaccggatcgcatcttgaaaacagcagcaaagcataagccaggggaagatcatgcttgctaattggtgcaagtttcgtctgactcttcatcaacggaaatacaatagatccaggagcacgcacacacacacgcccctcccaaaaggaccgaaattctgctcagaggatcctgtcagaatcacgtgcccttagaccaaatgaacaaggtatatctcttgtagctgaggacatttggtaggatgaaaacctctacttccaggatgccccttgatcgtgtaatctttaactcatctgttctagtgttccatgacaaccaccatcagcaagttacaatttgtggaatattggttttgtgcctgatggatatggtcacattcaatcccaacacttattagttgaataactaacttgtattgtgtgcgtaaagcactcagaacagtgtctgacacttggggagcatgcaataaaagttcattattcaatcttcctgacaagcctggaaggtgtgtactatggggtggccatggtgtttggaacagagatgatgatcttaccaaccattgcaatatcaataatctctttattggatatttacctctgtttccaggcctagtgatcactctgcattttacccccatcccaccacggaggatacaaagatttaggcacagtcattgcttgcattaggcagctggtgaggggtgggaggtaaaattcgcagtcttccctgtttgattccatagcccattggaagttctcctcttgcatgtcttcctcttgcggtttaattctcttattatgtccttggtggaggatcatctcaagatcgtccttcatgagcgacatacactgaatgtgtgtcctcccaaaattcctatgtcgaaacctaatccccagtgtgaccgtatttgaaggcagtgcctttgagaagtggttaggtcatgagggtggagcctcatgaatgagatgagtgtctttataaaagataccccaaagacagacctccctcatcccttttactatgtgatgacacagcaagaaggcatcatctatgaactaggaagtggtcctccccagacaccaactctgccagtgccttgaccttggacttcccagcctccagaattgtgagcaacagatttctgctgtttataagccactcagtttatggcattttgttacagcagcttgaatggactaagatggtgagtttgtggctggttatcctttcacctcgggggcctgcttcccgcctgtcctggggagggagtgggtataatgcttgcctcctttctagtgctcagggttccagggaagtccatgaggtggtgggaagagggagctatggtgtctgggggatgaaagctaaggacaaaggtgaggggtggggtttctaagctccaggctgccagctccattggtggcctgcctaccttggcctagggactgaagcagtgggcccagctgccctctctctccacatggagtttgtggaaagaagaacactacagggcccacctggcagagatttcacctgcatctcagtgagtgtttgatgccagagctgcttgctgggcttgacgggagccccaaggggcaggactttgtcttctttatgtctcgttcagcacctgctgtgctgtcagacctggctccagacacatgaggccagctggcctccaatggtctctcctgcctctaatcacacaccagccatgcacatccaaccatacatacacccatgcatacacaaccacacatgcatgcatgtatatagaaccagatgtacatgcaacaaaacatgcatgcacacacaactgcatgcatgtgtgtacatacaataacacatgcacacacacctctgacacatgaatgtacacacaaccacacatgcacatggaggtggagggtcgggaggactctgctaccccagagctggactttcaggccccactctgcccagacatgcccagtccctggtgccagctgaggggagggccctgaggataagagaggctggcagacatgaagtcctcacatcctacagctgctctgccttgtgcaagagtccacagcccagcccacacctttcctgcctggtttctctccatctatgagacctgctatccagagcctggagggctggtctgcatggggtgaaggtgatgtgttggctaagttttgatgacacatggggcagataatatctgtggtgcaatgcacatcctagagctccccatggggccaggctgaggctacacttccctcaaaccatctttgcctaacttccctcctgccctagcccacttccctctttcccttacaaatttctcctgatgtcattcccttcataaaccacgtgcccaggaatccctctgtcagactctgcttccaggaaacctgtcctgggatggtgtcccataggccctggagctcacaccatagggccaccagtggttagagtacaactaggcctctaagacctgctctcaactctctgggggagcttcaagtcttggggttctctggcatgaccctcatcttcccacccccacaattacatgcatgcacacccatacccatgatacactcatgcatacacaaccacacatgtgcacacacacaaccacatgcatacatgcacacacaaccatatatcatttatgcacatataacgacacatacacccatgcatacactactgcacatacatgcatgtatatagaaccagacatgcatgcatgtacacacaaccaagaacatgcatacacacacaactgcacacacatgcacacacacctatcttactcatgcatatgcaaccacacatgtgtgcacacacaagcacatgcttacatgtaaacacaaccatacatatgtgcattcacacacaatcacacaccagccatgcacgtccaaccacacatacacccatgcatacacaaccacacatacatgcatgtatatagaaccagatgtacgtacaacaaaacatgcatgcaaacacaaccatatgcatgtgtgtacatataacacatgcacacacacctccaacacatgaatgtacacacaaccacacgtgcatacatatacaaacacatgtatgcacacacaaccacacacatgcatgcacacacacccctgatacactcatgcatatgctaccacatgtgtgcacacacaaccacatgcatacatgtaaacacaatcatagacatgtgcatgcacacacaaccacacagccatgcacatacaaccacacctacaaccatgcatacacaaccacacatacatgcatgtatatagaaccagatgtacatataaccaaacacatacacacacacacaaccacacacatgtacataaagtaacacatatgcacacacctccaacacatgcatgtacacacaaccacacacacatgcatatgcaatcaaacacatgcatgcacacacagccacatacatgcatatacaatcaaacacatgcatgcacacacagcccacacacatgcatatacaaacacatgcatgcacacacagccacacacatgcatatacaatccaacacatgcatgcacacacagccacacacatgcatatacaaacacatgcatgcacacacagccacacacatgcatatacaatccaacacatgcatgcacacacagcccacagacatgcatatacaatcaaacacatgcatgcacacacaaccacacacatgcatgcacacacaccacatgtatacacaaccacacatttgtgcatgcacacagcacacactgggcttggggggtctttggcatgacatctcccctccctgaggctcctgtggctctctggaatttgagaggtgagaggagttgattaccaaccactggccttccctcaaggccaaggtcatgctgaaggctcagcatttccactctccccttcatttttcctttccggggagaaggatggtctcccaggaagtctctaaggttggaaattgatttcttgatttccacatgcagtttgcttccaattcagggcatagaaaaatgcaatccttctttcattgatccttgtcaaacagtgcggtggctggaatcaaaggggcaggggttgcaggggattccccagtgtcctcctgtgctcagagagaaatccggcttcagaggagcccatctccttattagttttaaagatgtataacctgttttgtttcttggttagtttttcctccttttgcggcaaacagtacagacacaggagggcttaaaactgctgtctttgtgtggaaattccccttgccggaagtgtctaggtccgctttttgtgaataactcattgactaaacattatgcccctgcctggaacctgagagatagaccccactaaacagcctcagttcccctacttgccagcatcacccaaattatgagaagttatcttcgccccacactccatctgcagattgcctgtagagatctaaaccccagaccctgttttccatgaacaggatagcaggagtaagttgtgcttcttcactggcatgggttgggtggcctcttactggcatggggaactggggagtgatggggtaaggacagccagtaggagactcacatctttggcttgtgaggcccctagcggtgtccttggccatggtcactctcccaagtgtgcctcagtgcctgcctggctctttcctcgtgaaccttgtccctgtttgtcccagcaggtgctctgagccttgttgtcgcagccagcttgttcttggcatcactccaatcttgccatgctccctttgcgtaaccaccattgttcctactgtcctcttttttaggaaaaagaaaagctactccagcttctgggaagaagagatgcaaccccacacgttttaattttttttcctctcctttcatttctgtccccattcgtgggtgctctccagttctcaggtgttatgggatgaattatgtcctctcaaaattcataccgaatagaggttgaagtccttgcccccaaagacctgagaatgtgattctattttagggataaggtctttaaaggggtgattaggttaaaatgagggtattggggggccctaattgaatctgacttatattcttataagaaaaggacatttggacacatgatgagacaccagggacctgcgtgcaccgatgaaagacagtgtgggaaggcagctacttgcaagccaacaagagaggcctccgaagaaactgaccctattgatatccccatcttggacgtccaggctctagaatgatggaaaaataactgtctgttgtttcagccctccaggctgtgatcttttgttatggcagccctggaaactgggtgaaaaagccatttttaccaaaccacatgttagccagtagggatgagtggacggtagggcactgcttgggacagtgtcagatcccagctgtactgctcatcactgtgtggccttgggcaagttcctcaccctctccatgcctcagtttactcatctctaaaatagaacgatgacaatacttacctcacagggtgcttatgaggatgcagattctcagaaagtatctagaacaatccccagcaccaaggcagccccctcccccaagtatgagctgataccagcggattctgaaagctcaagctagaaggctgtgcaggcgtgcctttcccctcctggaccactctcctctcaggctgagcctctgtgaaggtcagtgaccacctcctctcacatctgagaaacagagaattgagagcctgccagtgctggtggaatctgggctgggtttgtacacggacccctgcacctgttccacccatgccagggaagccctcggcagacctctgtgctgctgcaagatgggcacactatctgtctcccactttgaacggtgagccttgctgtccccaagaggaagggcaaatgcacttggcagggacctccacttacagaaggaagagatccaggtttggaatcacagacctggccttcagtctccttccatcatttaccaatcatggtaccttcaccttgtcattcagtctctccgaactgcagtattttcatctataagtgaacaatgatactatgtacctcataacattatagtaaggatgtaataatattttaagtacctaataatagtaaattttataagagctacttattaaacgctatttattaaagaaggtaagatgtataccagaaaggacagtgtgttatttagagatacagcatcccttgaaggtgttgcaggtttggttccagatcactgcaataaggcaaatattgcaataaaaaagtcgcacaaatatatcggtttcccagtgcatatattataaaagttacatttacactataatgcagtctattaaatgtgcaataacattatgtctcaaaaatgtacatatcttaatttaaaaatatgtgatttataaaaaatgctaatgaccatttgaacctcagcaaataattgttttgctggtggagggtcttgccttgatgttaatggtggctgactgatcagagtggtggttgttgaaagttgctgaatggctgtggcaatttctttcttgtttttttttttttttgagatggagttttgctcttgttgcccaggttggagtgcaatggcgcgatctcggctcactgcaacctccgcctcccaggttcaagcgattctcctgcctcagcctccctagtagctgggattacaggcatgtgccaccatgcctggctaattttgtatttttagtagagacggggtttctccatgttggtcaagctggtctcgaactcccaacctcaggtgatccacccgcctcggcctcccaaagtgctgggattacaggcatgagccaccgcacctggccggcaatttcttaaaataagacagcaatgaggtttgctgttggacttttcctttcatgaaagatttctctgtagtatgtgtaccgtttgatggcattttacccatagtggaaatttttttcaaagttggagtctaattccaaatcatctcaaattctgctgctgctttatcaactaagtttatgcaatactgtaaattctttgttgtcatttcaacaatgcttgcagcatcttcaccaggtgtagattccacctcaagaagccactttctttgctcatccataagaagcagttcctcatctgtttggatctgaccatgagactgcagcaattcagtcacatcttcaggctccacttctaatcctagttctcttgctatttccacccaactgtagtgacttccttcaccgaagtcttgacctcctcaaagttatccacaagggctggaaacttcttccaaattcctgttaatgttgatagtcttacctcctcccagaaatcatgaatgttcttaatggcatctattaatagaatgataaaaaaaaatcctttccagaaggttttcaatgaattctgcccatatccatcagaagatctaccatgatcaatggcacctacagccttacaaaatatatttcttcaataataagacttaaacatcaaaattactccttggtccatgggctgtagaatggatgttgtgttagcagtcatgaaacaacatgaatctccttttacatctccatcagcactcttgggtaaccaggtgcattaccaatgagcactactattttgaaaagaatatttttttctgagcaataggtctcaacagtgggcttaaaatattcagtaatctatactataaacagatgtgctgtcatctaggctttcttattttgtttatgaaacacaggaagagtggatttagcataattcttagagaccctagaattttcagaatgacacagagcgttggcttcaacttgaagtcaccagctgcatttgcctctaacaagagggtcagccatcctttgatgctttgaagccaggcactgacttctcctctctagctatgaaaggcctagatggcatcttcttccaacagaaggctgttttgtctaccttgaaagtctgttgtttagcgcagccaccttcatcaattgtgcagctagatcttccagataatttgctgctgcttctcaatcagcacttgctgcttcaccttgcacttttaggttatggagatggctttttttttttttttgatggagtcttgctctgtcacccactttggaatgcagtggtgtgatcttggctcactgcaacctccgcctcctgagttcaagcgattctcctgcctcagcctcctgagtagctgggattacaggcatgcacaccatgcctggctactttatttttatttttgtatttttagtagagatggggtttcgccatgttggtcaggctggtcttgaactcctgacctcgtgatccgcccgccttgtcctatcaaagtgctgtgattacaggcgtgagccactgtgctcagctggctttttttcttccttaaacctcatgaaccaacctctgctagcttccaacttttcttctaccgcttccttcctctctcagcctccataaaattgaggaaagtcaaggtcttgctctggattacgctttggcttaagggaatattgtggctggtttgatcttccatccagaccatgaaaactttcttcatatcagcaatacggctgtttcactttcttatcattcttgtgttcactggagtagcactttcaattttcttcaagaacttttcctttgcatttgcaggttggctaactatttgcacaagatgcctagcttttggctgatctcagctttccacctgcctttctcgctaagcttaatcatttctagctgttgatttaaaggaggggacgtacgaattttcctttcactcgaacactcggaggccattgtagggttattaattggtctcatttcaatattgctgtgtctcagaaaatagggaggcccaaggagagagagagagagagagagagagagagagagacaggggaagggcgggtttgtggagcagtcggaatgcacgcagcatttatagattaagttctttgtcttatcttggtgacaacacatctgtttgtgatgtcccaaaacaattacaacagtaacatcgaagatcactgatcacagatcaccatagctgatataataataatcatctcttttttttttttttttttgagacagagtttcactctgtcacccaggctggagtgcagtggcacgatctcggctcattgcaacatctgcctcccaggttcgagcaattctcttgcctcagcctcccaagtagctgggataacgggcatgtgacaccatgcccggctaatttttgtatttttagtagacatggggtttcaccatgttggtcaggctggtcttgaactcctgacctcaagtgatccatctgcccgcctcagcctcccaaagtgctgggattataggtgtgagccactgcgcccggcctgatataataataatgaaaaagcttgaaacattgttagactaccaaaatgtgacaagagacacaaagtgagcacatgctatcgaaaagtggtgccgagagacatgcctgacgcagagttgccacaaaccttcaatttgtaaaaaacgcagttatctacaaagctctatcaagcaaagaataacgaaatgaggtgtacctgtacccccttctccagatggagacctttttaaagaataactctcagctattgatggtcctgaatattcctgcctgttgggagtcccaaggaatcacagctgagttccactctggttaatggcctcagggtggttttctgtaaatgatcgtttggtacagtgccagggctaatggactcaggggctggggggggtcgctaacagttaggggcacagaggcacctgggtccttccagtgtaggcctgtagtgttcccaacccatctgaccagcaggctctgtgggctcactgcaccttgtactcctggtcaactgagtactgtgcctgccgaaggcctggccaggggaggggctgtgcaggccgggctgagcagtgaggctggctggacttatccctgctggccacaccatggctaatggtatcagggcctctggaagcactggggatgacgatgcaggcttgggagaggcagatctctctctctccaggtgaggtgctgcctggactggactgcaatttgagattcccgcatgtgctctaccctgtcatgagaaccaggaagggcaattaccaagttgactgaagttttattaacctgccacccaccaaggggagtaaatcaaagaagtccacgttattgaatcatcagctttaggaacatagacgtcgtctctgccccgagtgcccctggctgcatggcacagcataaaacacggcacctctctcccgtgacgggcgcaaaatcaggatgcttaaataattcaagtctagctcttttggactttcaaaggtgctgtgtgcccgactggcttgttgttgtagtttagttttttttaacagcagatttgttttcctatgactgatattaaatgaggttctctttctgagttcacacctacaaacggacaaggaattgtaccagaatgtgttcagtagagagggcagaagagcctcctcttttcttccttctctatctttctttcttcctttctccctcccttcccccttccctctctcctttccctccttcctcctcccttcttctttccttctttgctctctcattttctttcttccttcctctctccttctttctccctccttctcttcttccttccttccatccttcctctctcttccttccttcctctctcccttccttcctctctctctcccttctttcctcccttccttccttcctcccttccttccttccctccttcctactttttcttcctgattctatgtacctatgtatatttattcatctatccatctacctatttatttatccaatcgtttttgaatttttatactgggtactagggagtcaatgcaacaaggaaggatggcattcttcctgctgtgtagcagattgcatttaccaaagatgactgcaaaaatatttcccatcccacatacgctttgcaatgtggtcttgccactctcgcatcaagggaggtgtctgtggccttctcttggaaactgagcctgccttagtgactcgtttatgactagtagaaggcagctgaagtcatgtgatgctgtgtgacttcctcagattagaagaagccgtgaagcccactttgtgggctgtaagaagtttgagtacctgagactgccatgctggggaggtcacatgtacgtgctctggtcacctgggctcctggctgacagcaatgacttccaggccagtaagtgcgccatcttggaagtcgtgccttcagatgaccactgtctggctgacatctgactgcagctgtgtaggagatccaagtgcctaggtgagcctttcgcaaatctctgccacacaaaatcatgagcaaaatacaatggttgttttaaaccattgagcatgggggtcatttgctacacagcaataggtgactggactgtgctctcaaagaacgtatggtccacgtgggaagatagatattaaactctcccacataaaattgtactagaaatcatagcaacattgaagagctctgtagaactaggagagtgcattggtccagagaggttggggagcgttccctgaggaaaggggtgatgattgagatctgaaggaaaaacaggaatttcacaggaggtgagaggaagagtattctggcacgagcaaaggtcctggggcaggaaggagatgctgaaagaaggccagagaagttgcagagtggggaacaaggagaggccagagagagacatggggcccagaccctgcagggtcacgcttgcatgccatgctgaggatctgggcatttgtaagaagagcaatggaagcagtagttgtgggtgtcaggggctctggttaatgagcctgggagcactcgcctggaaatggcactcgaaggggaaacggtgtaggtgaaaaccaatacccaataggaccaaggttctggcgggggcagctttcctgctgagggtcccagcgccttgctttcctaggaaaggctacaacttcaaattgaattgcacgaccttgggtgggtcatttcacctctccgggaactggacttgtatggatgatttataggtcctttcaaatcccatgaatcaaagaatcaatcctcaatgactttcccatcacgaacaaagcactcgctaaaacttacataaatagattaaatgggccaatgacatgagattagatttaatatgaatcgttatcataatgtgctgtctacagagctgtgtcttttccccctaatgccagccttattttaatggcaacactgggttaggaaaggcagccactgagcaaatgtcccctggctccctggggaaagtctgcctgtgtcaaactgtagcggagaaataaatgttacacacgtgaccatggcctggacatggagctaagtccctgcctggcacgcactcatccccagatgcagacagtgcctcgtcagcaaagctgactcaccaggaaagggatgcactccagacaccagtctccagcattcccttaagacatgaactccgcacgattgaaaatgcagaaaccaatgatgctcacaggtttggggtcatttactctccctgggaccttggaccagttattttacctctccaagcagaactttcctttaaactgaagattaaaatagtcacttacctaccttcaaggtgtgatgcagagatgaaacgaggtaattcctgtaagttgggcatatcatattcacctggcacctagtatgcgctgaataaatgttgactattattattccagtcaattcttcagtgctgttcttgaataattgaaactacacacagttaagatgacaaatgtcaaacccagaaataccaagggcctgctctatgaatttatgctcaaattgactgtttagaaaacagagagtaggttcggctcgtctcggtaatcccttttgctgttcgtataccttccctagttaaaaataaaaaccaaaacaaaatcgcaagtaatgtgaaggaggggtgctccagcccagtggatccaaatggtatttgaagtcactcggaataaccggcagggccccgttcctgttctgggatgcatgctttgggcttgctattgagtgggcacacaggcgtgcacacacacacacacacactcattgctgaaaatgtgcccagaaaattaattctcgtttccttgatacagtcctgttctgctttccaagacgaaaaacacatcacctcccacagcagccgcctcactcccatctgatgagggcaagaggcaaggcagggaggaagcagaaaggagggacggagatggcaaagagttctcagttctccacctgcgctcccgagcccctctccggccagggctggggactgtgtgccttcaacgcaggcaaaataaaatggttgcatcttggatccatctagacagtaaattttttgagtccttataagctaaaatcaatattggcacaactgtgtgtcattaaaaactaaatgaacatgacaaagcccaactgctgcctattaaacaaatgagttttctctccgcacaggcacagcgggttattaaattctttattacaggaacatcaccatttgaagggggtaaaaatacgtctttatgagtcatctgtgtgtgtgtagcagcgtggccttcctgtgctcgtcctcaaaggcgctcaggagccgccaaccttctcctcccccaggaagatgaggtttctccgagctctctatcagcagaggtggagagaaagggttccatgacacctggtgttcactcacatgttacggatccatccaatcattactttgttaattcatcaatatgtatttattgaacgtctactatgagtcaggcattctgctgggtcctgggatcatccatttaagccaagatacttggaactgcatttcagaagagccagttgcccgtagcctaaatgacaaggatatttattttctcccctaacaagcctggagtcaaggtggttccagagctgatgtaatgatccagtgattttatcatagactcagattctttcatctttataaagctctgccgttctcagtgtgacactggtttcctcatggttgcaaaagggttgccattgctccaaacatcttgactgcacacagccatatccaatggccattccgtccccacatttcattgtatctggtagtaaaatctattacagaagccctgaaaagtttctcctcacatgccagtggcccaaggtggtgcatatgctctgtgtctccctcatcgtaagggaagctggaaatgtgttgttcataggctccttctacctctcgacaaagctttctttttctattttctgggcatttgtgattctcttggatcctcacctccagtgcccccaaacctgcttgctgtctcttggcattcccccagttcctggcagtgctggtgttcaggctacttccccagatctcctttcaccctcctctccacctctctctgtgctccaaggggctgattttctttctttctttctttttggaaatggagtctcgctctgtcacccaggatggagtggtgccatctcagctcaccacaacctccacctcccaggttcaagcgattctcctgcctcagcctcccgagtggctggggttataggtgcccgccaccacgctggctaatttttttgtatttttagtatagatggggtttcatcatgttggtcagctggtctcgaactcctgacctcaggtaatccacccacgttggcctcccaaagtgctgggattacaggcgtgagccaccacgcctggccagctgactttcatagagatgttcaaggggctgctttgccttctggtttcagttggggtagaccagtggaaggcatgactggagatcagaaagcaagaggagagggaactggagtcatggtttccctaggtccctccttgcaggtactggggttgtccacgcctttctgcctaagctgtcctcttatgcatctgctctcgccaatattctggtacctgctcccatccattactgttcatacctggaaccctgggttgctacaccattcctggagggcttcccctgcattcagctctccccacccacctatctgagcctgccctctgcttctcaccagcactggctgctagcccagcccatgcctttcaccaggttctctgcctgtctcctcagactgaaacatcatctgacttgctatttcgttctcaactctagctttgctcctggaaaagtgtccttttggtccccatcagttctgtgctatgtagccatgggcaagccctttccctctgctgtgcactccaccattgttccagatcccagcccaggtacatgtcctggctcccacttgcccagatgagcatatactgacctgatactaactggagactcttctgtctttagaggatggaggagggaaccgaaagagtggaggaagaaaaatacaaagaagtgcaaagatgggagatggatgggactctctctgaatagccccaacttccctctggagaaaatggacagtaccagtgtcctggtcagccttggtacccactgggttttctcatttgcactgggagatgacacatcttctctgcttcagctcaggattactacttcccgatctcagccaggtccaagaagcagggattcaggacttagcatgtttgcttctgttgttgctcctaattttcatagtagccaagcagagtagacattatggtccctgttttacagttgaggaaactgaggcgcagacattaagcatcttgtccaaggtcatgtgttattcctatcaggacttggaccagaatcctatctcctgacttcaaattccaggctgtttctctgatgctgtagttcctagtttctgctctgaactgacttgcgttctatacgctgaaccgaggagtctgttctacaggttaatgggataatgactgtctttcctcaatttgcagatagaatacattagtacatataatttctttgattattctgttgttttccacatttttgtagagtcttttggcacttatcatcctatcgtcaatacctgaatctcatataaaatgggatgtgatttagcgtggcattacacaggtaactccaatacctcaatagctctcagtgtgttctgcacagactaggatgtacttgccccatgctttaggcccagattcatgatttgagaaccacttttccatgattttttcagtccagaaaggctaatctagacattttaaattctagcatgactaaacagcaatgactccagaagttctgtgttcatgcagactccagatgtgggtctgcccctggcctcccgggggagagaactgggttccatgagttatgccttcaacaggcacaggagtggggactgttgactgcttgctggtaatttacacaccctgacccagacctggcctccagcagaagaaaagaagctgattccaacctgtcttggttttggctctccttagaacatcaaaggtgtatgaaagaggctgagcttgcctcatctcccccgcctgtgttaagtggtgatcaagatggcattagagatgatcacatcatattatttaaacatgattttaaatagctgtaacaatggccaagctccatctgcagaccttgaccgctgcccagcaaagggcagttggttggcttacacgatgagagcattgctggcacgcaggcttgtccgtcatcctcgcttgctggaactcagcagcgagtctctctgaaggtgacacaggctttggtgggtggggtgtggagcacggccggctgcaccgctggaagtggggcggagaggagcctgttacccgggaagtttaggggcatatggaagcagtgaccccttctggccaatggaggaatgacataaatttgctagcaagggaagacaggcggagaggtgaacggccagggaggccttggcggggaagaatggactaatgagaatatctattatgactcgtctcttcagttattccctaagtggctgtgtcatcctatgccagccatcagagggaggcagaataaaagtgtgtgtccagggaggatgtgagcatgaccatgaaccctggccactctcatctggaaagggctagaagggaatggggtagtgaggaccagctgtggaagcctcagggacaatgggacatgcatctgagaatcttgggagtggccaatgctcctggtactgggaggcttggggtgccggaggtcagcagccacccctcctcgagctctgtcagccagggattcctggagatagtttccaccgcctttggagaggtgggccatcctggaggctggtgtgaaacagagtcctctccctgttctgtcctagagtcggacagaacagagtcaggctcagctcttctcagctgctgacctgctctgtggtcaaagacggtagcccctcccagcttgggtgtgctcccctacaaagcaaagcaaagcaaagcaaagcaaagcaaagcaaagcaaagcaaacaaagcatgtagcccctcccagcttagatgtgctccctgcaaagcgggcagggtatagggctttatggagaagacccgttgatatcatggtttccaaagggcctgacagtaggtgctcattacgactcccttgctagccctgtaggccggtcatttcagactgctccgcaagccccccatgcctccccgcctttgcacacaccattccttcttcttggacaacctctcctttcctggcccatctggtctacctggtctactcgggcacattcaacttgttcttcagggcttggttcaaggccttcctggactgctgccctgatcgccatgcagagttaaccacttcctcatctatgcgcctctaacactgtagctataccaagcgcactgtggtacttacttatttgcataataacatcattacattctaaaaatgacagcagctatgaattgttgggcactttctgtctgccaggcactgaatggtgagcgtgctgtggatgatctcatttcagcctcacagtagtcagtgaaggaggtgcaattgttaacctgtttaaggatatactaaaaggaggtcttggagaggataggtcactcacccagcctcacacagctgcagtggtcctccacaaaagggcttgatttggggcatttgccaatttccatggtgtaaatattccaaggatgataattttaaactaatgatgctttgatgatgggcttgtagtattcctgaaaatttagccataggctcccatgagctggtacaaactggcatgaactggttgcaatgtgtcactgcgacagctctctgtatctcaggagcagggactaggttttaataactcatgaccccgagtgccctgcacagtgactggagcttagtagctgctaaattaatgttggtgacatgagatggatttcagagcatagagggcaggggcagaggctgcctggatggcgcaccccaacaggacactgcctttctcctcctctgagtggatgttgtctgacagactcacatttcaaactgagcgcaggtgcagtgggctgtcaggggcagcagaggcctctgggctgggaacagatgtcacatctgggcatctgacaggagaagcttgtggagaaaccaggagaggttcagcctccagcctcaggtcctggctcccgccagccttccagggctcgattctcccgggacaagtagaggggctgctgcatgccaagctgtcatcctggtcaggccaggtcaaaaccgaggcagggtcctctttgaatgtatgtgtttgtgtgtgcgtgcacatgtgggggccggaggagctgaggatcacatgggaaaaccgtgtgtgtttatgtgtgagagagagagtgtgtgtgtgagtgtgtgtgtgtgtaaatgagaaacttttatccccacaaaaataaggatgtgagattttattttatccagctgatgccagaacaaggcactcatagttagccacagaggcactaactagagtgttaatgcatgcctgaacagggcaagaaccgggaagggagtgccaggagaagagacttccagagatcactcaggtccccgtgatgggcagcctgtgcacaaggggtctggagcagtgagaagatgaacctgccaaggcccagaaccattcctggagccaggtgagaaatgcctgggtcagtgagtgtcagcgttggctgcaacagcgattctaaaactcgagttctcatcagtgtcagcaagggcaacgtgcacagtctcacaggtcccacccaaacacagaaagacccgcactcagaaagacccccacactcagaaagacccccacactcagaaaggccctcacactcagaaagacccccacactcagacataccctcaaactcagaaagaccctcatactcagaaagacccccacactcagatcccgcactcagaaagacccccacactcagaaagatccccacactcagaaagacccccgcactcagaaagaccccccactcagaaagaccctcacactcagagagacccccatactcagaaagaaccccacactcagatcccacactcagaaagacgcctgcactcagaaagaccccgcactcagaagggtttagtagtctgctgttgccatcctgagattcttaatattttttgaataaggggctccacattttcattttgccctgatccccacaaaggacatagctggccctccctgaggtacctgtaaaaacccacgttgctgggtacctgccaagaatttctgattcagagaatcctcggagccagaggaatggggtagcgccgggggatcccagcagagggaaggcttgtccagacgagctctgtggccgggtcacagctgctgctgcttccgagtcagaagtcaagagggtgcaagggggccagctcagctcaaacctttatttctcaaagggtcagaaagcccaaaggccagcgctggctttcaatgcacgggaaggaattgagggtgaaggtgtgagaatggacatacacaacccaaaagatcagatctcagaaggagtaggcaaatctggggtggaaaacggagtctgaaattggctgctgggagggcatggtggctcacgactgtaatctcagtgctttgggaaacggaggagggaggattgcttgagtccaggagttcgaggctgcagcgaactatgatggcagcgaactgagtcacatgaagcaacgtacctgtacctgccccattcgttcaggagcaagttgttcaatgagggctacttgcactctagagaaaggttaacgtgctgtctgttggatgcactgggccagcagaatggtgagtggaaggttttaagctcccaggacataagatggtggaagtctgaggtatcccacagccctaatggtaggctggagttttctgccttgaggaggttgtgggactatttttagcacgttttccactacaaaatgagttctcactgacctgtgttggaggctgaatcccactatttaagaactgtttcttccatataaaggagagggtgcttaactggagattacagacctcttgggagtcaacggatgtgccccggaaggtccacatgccctgctgaaattgtttgtgaaatttagtgtgtgctatagacacatattttttcctggggagaggatctgtagctttcatcagattctcaaagggttctgtgacccccctcatgaaaggatttattgaaatggtttgtctaaaagggggattattcagtaaatagtgtcagaataactggccaaccctttgaaaaaaaataataaagcagtatccttacctaactccttatacccaaatatatccccgatgggtcaaggattaacatactaaagaaaaaaatgaagcaataaaagttacggaagacatttgggtaaatatatttacaatgttggagttggaaaccagtttccaaagtgggaaacgaaaaccaggagccacacaggaaaagactgatcaatctagttcagaaaaacgaaagcatcagtgtgggtaaaatcaagacaaaagactattgaggtcgaaagacaaggagtaaatgggaagtcatatttgtagcaccaatcacagacaagaagccaatttattaacttatgatgcatttagataacgcataagaaaaaaattaaaataactaaatataaagacatacctacaatgtgggtaagcagtcaacactgaaagaaagacagccaacaaaaagattaaagaaatgcaaatggataccaacaattggattatcatttttttaacctcacagattgaccaaaatttatattgatggtgttttattatatggatgttttatattttatttcatcttgtgtttgctatttggattgcatctggttctcaggtattagaaacaatgttgtcaagaacaattttgtagttacatccatcattatttacttcaatgcctgaagcatcaccaacatttagcgtcatgtagctgatcttgtcccttccaaagggatcagagcatacaggctggagccagggtcatagcacagagttgtagccctcctgggaatggtagccctggatgtcgagatggaaaatgtggtaaattatattcaataagtgtccattatgtgcaaattgtgtgctgggtacttttgaacaattttattttatttaagacagagtctcactttgtcacccagggcggagtgcagtggcatgatctcagctcactgcaacctccgcctcccaggttcaagcgattctcatgcctcagctggaattacaggcatgtgccaccacgcccggctaatttttttgtatttttagtagagacacggtttcaccatgttggccaagctgatctcgaactcctgatctcaagtgatctgactgcctccgcctcccagagtgctgggattacaggagtgagccactgcgcctggcctggtacttttgaatatattagccatctcacttcacaacaagaagaaatcaagccagcatttccccccattgtacagatgcaaaaacaagatcagaaaggtttagtaatttccccagattgcacagtgaggtaagatgcagatccctccggccgaaagcccgtgttcttctcgccttgccagctgtctgttgagagcagcagcaggtaattggtggtgtacttctggagggtggggagaccaggagggaagaaagccactgccagggaggcggaaggacccccaaagacaattttgtctctatttacaattttcccaaaggttgaccctgcccctgggtgccctgatgtgttttcttcaagggaacattctgcgtgggaggctcagaggttgtctctgtgagttcgtacaaggaatggatgataaatagcaatgggccttgttctgcctccctgcgcctcgtgactctttaggtgcatttaaatgggccacccgggttgactctaagctgtcattgcccacgtgtgcatgcaagctttcacagagctcagcaacggaaaagacatttctccattccctctggtcccaggcaattcaaaacctttctcatctaattgctcttcttaacccttctaattgctgttacgttgctgttcttcccccgctaagccagctgactcgtcttccctaccttcatactccatcagaccactccccacaccaggtcacccaattaagtaaccatgttcaggtgaaagtcttcacaaaccaagagcaggtaccgtgttaccttttaaataaattctaaagacccaacactgtcagaaggagtttgggggctcagagttgattttctaagaggaacctctactctaaaccataccatgtctccagagctgtagccagaggagatgaactgtgactctggggaagcggaactatgaaccagtggaagcagagagaggaaccgtctggtcctgttagtggcagatacaaagtttccttactctgctattactcaaaggtggttaccagttaagattatccccccaatagttggctattccttttcttttcttttcttttcttttcttttcttttcttttgagacagagtttcactatgttggccaggctggtctcgaactcctggccttaagtgatctgcccacctcagcttcccaaagtgctgggattacaggcatgagccactgcgcccggccctatttttttgtatttttagtagagacggggcttcaccatgttgtccaggctggtctcaaactcctgacctcaagtgatccgaccaccttggcctcccaaaatgctaggattacaggcgtgagccaccacgcctggctcatagttggctatttctaaagacatgaaaacacagtgagagacagtgtagaaagtatcaaatgactttttaaagtgtacagattctttgaccgcctgcacaattttactcctacgaatttatcttaaggaaagactccgatttgtacaaagatctatgtacaatatgttcttctcagaatcttctatgctatcggagaaacggaaaccaactaattattcaataaaagggactgaccaagaaaatgaatgtggctattaaaaaccgtgctgtaagaaagatagtgacgtggcagaatggtcataatggactagtatcaggggaggggggcatgaatgatagggaaagcaggctagaaaatagtatgtacaatggtacgtgtgtttataaagaaaaaggactgggaggagagggaaagaaggctagaaatctctgcagcaaaaatgttaaagaggtttcctccagggtagagaattatgagcaatttttctttttcttgtgctttttggttttccacttttactacattgagctcctttgtaattaggaaaaccaggtttttaaaagaggtggttctgttacaggtcctttggtccagcgttctgtagttgccacgggctgtggtgggagcctggaggtgtctgctcagggaagggcagctgccaggtggggtccaggaggcaggtggctatgcaagcagctcagcttgtaggataggtgagcttggctcatggactctcctcccgtgatcacttttcccacctcccccctccccccaccgatcccacaggggacattcagtatcccaaatacccagcctgttagacatagtgtttgatcgaagatcgagttcctcggattgaggctgggttgaaaaatgacccatatgtccctagagatggagcagagctggagcggagcttagaatttacaacccagcctcccagcgctgggcctggacaccacgcaattttgacagatgattctcatgagaaactttcagtttccatttgattatgggcccataaacacagattgcaattgaacagagttagggctctgcctggattggacctgccagggctcagggagccttactggatggctctggcctgcctgtcacctgctggttctgagctgctgcctacagctatgcatgtgttgtgatgtggctgttggacgtatccacatgcatctcttatgtgggcatctgcctctcccattagcctgggcagggattgtctttccgatggatcatctaatcctaccatctttgggtggtagttgtccctgctggttataggaggtttcagctaactttggtttagggttcaccatcttgcttttactttttcactcactcactcattcattcattcaccatttgacattattgagcagctgtcatgtgtcagaatacggacttagtaataccaggcggactcagggataccaagaataaagtctcactgctagcgtcagaggagtcatacttaagaccgtgtcacatgcattaatttagaaaaacgttcagggagctaagagaacacagaggataaacccctaggcaggagggagaagccagcctgggctaccaggaagggaggctgttcactcaattcatctcagcaagtgtctggagtagctgcactaggctagacccccagaggattagacagagatagtgcagtggcacaagctagaccacctgaggattagacagagatagtgcagtggcataggctagaccacctgaggattagacagagctagtacagtggcataggctagaccacctgaggattagacagagatagtgcagtggcacaggctagaccccctgaggattagacagagatagtacaatggtgtaggctagaccccctgaggattagacagagatggtgcagtgccagtgttcctacccccatattgcttatcattgttgagtatttcttccagcattctaggataagactgcttctttctcattccccctgtggggtaaatattaggagttgcttcaggacccttgagcaaggggacaagacaaacctatagcagagtgacacctgcggggtctggagtcttcagctggaatgaattcaacaaatactcaccttgtgccaggcactgttcaaagcactgggcaagcagaagagccaaagaggcaaagtccatattccactggggagaaagagaaagagatcatcgtcgaaggcgcacgtgcataggtcaagtgcatagggtcaagtgcagaggagtgcaaggaagagacttcagtcagagaacagctgagagaggacggagggcaagtccatgtttatacacaggcagagacgacggcagcttggactgtggtggcaacagaggaagtggctggaggtgactggactgtagatgcattttgaaagtagagcttttagagcgaggggtgtgggagacagagaggagtggaggatgattcgagggtttccagcttgagaactggggagtgagttgctgtttactgaggcagaggagcctgggagagaaacaggtttgggggaagccacttctgtcccataactgtagcacttgacggttgtcccaggggactctcacgtgccccccccgcctcccccgcctcacagttcctgaccggtgctgtgatgtgccctgtctttttgtgacccctgcgtcggcctttcttcctcggctgatgcaccatttgcactgacctctgtgctgcaaatgcagcagccaggctttttgcacaagcctttttgctcaaggccagttgctgctgggagaaaatgcctgtccttgcagggttccccgcctagtgcaaaccacagcacactgccactcagagcccaaggtgaccttcccaccctgggcgtgggagtcaggcaattcagcaccagccctgggcccccaggcctgtggatgctgctgcctctttgccgtgctgtgcgcggcgccggctccttgtccatagaaacatcccagcccactcagcggcttgcgaggcctcccgccccgggtctggtttgcaccagcctcttttgtgtaccagctgctccggccgccgctctttcatccctgctcctgggagggcctggctccgcaccctgcacaaacacatctggacttcttcagaccacatgacaggaacagctgctgccagaaagaaaaggacacagtggcccttttgtaatcactcttgattgtctccagccgtagggcacttgtgttttggtcatggatttaaggacttccaagatgtttctaggagcatattattgccccaggcctggctgtgccttctgtggtccaggtggcagcaggaaagggtagaggcattgggaccgagcaaagaggctcctgtaagtgtgtcctgaggcttccaccttctaggatagaacagggcacacaaggaggaagaaggcagcgatgtggctgtcacccgccgtagccacctgctggtatggctgacaccagccctgggccccgagacaacagccactgcaggccttgaggcccagcgctggtgctgaatctcctgtctcctgtgcacaggacaggaaggtaaccttgggctctgagctagaatgtgctgtggcttgcgctagacggggcctggtggcttccatggtctcctgttgactccacctgccagtgtctgcatctctttgcctgagggctttttctaaagctgtaaaagtttgctttgtcagaagaggggaaatgaataccctcccccagagcagcctactcagctggtggctgaggggattgggtgtataaataccccagctaccttgccctcagcagggaggacttggaggcatctgttctacaggtcaccagaggaccccggaggactaagctccagctgccagcgtgggtgctggcttgatcccctgctcctcctcctcctcccctgctgcctgtcctccctgtgtcccctcccgcctccctgactgtggtcttgtatctcctaaaggtgtactggatccttctcccaggacctgcttttgggtgaacctgaactaagaccagtgacagcaaaggtctatgggtttagggattgtttttagggcagttcaaacaggtaccaagaacctgtgggacaaatacattaaaagtggaactgctcaatagttttacttggaatcagctttgaacgtgcctcaaattcggaaaaagtgcacaaaatcggccctttataagaagcaaccccacagttgctgaagggaagggttcctctgtctctttcttctgcctccatacaggaacattttaagccatttaaacctccatattccagagtcagagatttgggctgaacctaggtagctattttgacatcatataggactacactgagacaaaatctaagggaaaagtggagcagtcggtccggaggcttagcttcagcgtggtttgtggacatggttcattcattggctgttgtcactggcgaagtggaacttctggggttcggattctttaacttcataattcagccagtgggattgttttctgggtaatcatgacatcagccaaggttcagtcatagaatcaggaaggtcaatttttttttttttttttgagacagagtcttgctctgttgcccaggctggagtgcaatggcatgatcttggctcactgcaatcttcgcctcctgggttcaagtgattctcctgcctcggcctcctgagtagctgggattacaggcatgcaccaccacacctggctaattttttgtatttttagtagagatggggtttcaccatgttggtcaggctggtctcaaactcctgatctcgtgatctgcccacctcagcctcccaaagtgctaggattacaggcatgagccaccgtgcctggcctttttttattttttttaattatttttatatattttttgagacagagtctcactctgttgcccaggctggagtgcagtgacgtgatctcggctcactgcaacctccacttctcaggttcaagtgactctcctgccttagcctcccgagtagctgggaatacaggtgcccgccaccccgcccggctaattttttgtatttttagtagagacggagtttcaccatgttggccaggctggtcttgatctcctgacctcgtgatctaccccacttggcctcccaaagtgctgggattacaggcgtgaaccactgtgcccagccaggaaggtcaatctttttgtgacaacatgggagtcacaccacagtgacttaatcgccacctgtacctcacccactccccaaaaactcaccctgtactcatgttcctggatgaactagctttgcaaatatcagccgtgtgtttccatcatgaaaacccatcctctgcatcctttatggagctgacctgaaatggccaacagggaggaccggccccttctggaccagctgaatttcaaatcaacatgatctctcacacacgatctctcatcagccgctggctggaaagacacatgataaaggattcggcagagcttctgacaccgcaggctttgcgaccttgtgaggcttgggagagaagcctggttctcatttgaacagatgggcctgtttgcaaatacttcctctgataccctagaacagacaacatcctgtctgaggtgggtggttgtgactgaagagaccaaacagacctcaaagaaacacctgccacagaagtggcagctctgactgtggagccaagaaagcttctgcattgctgcctctctgtctaagggtggaattctttttattattattattatactttaagttctagggtatgtgtgcacaacgtgcacgtttgttacataggtatacatgggccatgttggtttgccgcacacattcactcatcatttacattaggcattccttaagggtggaattcttttaataagcaggccacggtaaggttctgagagtaagagggagaggcagcctccctgctgtcctgcctgagaagctggaggctgaggtctgatggaggaagacaggaagaagagaggggcaggatgtccatgtatctttctggatgtatcacagctgtgcctggtaccaggcaggggcagaccatttcttcaagggctgatgctattctgagaaggtatcttgcccacccaagctatctcttggtcccagacttgtccaattttcttcccaatgacaggcagccaacaatgtgccctctttgcagtgagactgtactgcagttggagggagagccctgtaggcaatgcagagtgttcccagggtcattcccaaacgttcattcaagcagggcactaggccaaggctctgcagcgagagacaccctgagacttctgataccctctgggacgagactgacagataccagtcaaggatttcactaattcatctcccgtggcccaagcagatgtaattcatgatattcctatgttcaactgggacacagcctcagaatccttcttcatactccaatacagcaggcagccacgaatgccgagatccagagctgacacccaagatgcaacatgctttccacatcttccctggggacttacagtttaaaactgattccctgacaccaataaccatgcagcagatatgcagatacctcgataagaaaggtctttgtgatttataatagcagatataatcattcaccctgcctaaaagctaagggtttttgccatactgtgaggttttgaagcagagtatcacgtgattcgtgttcctgaatttgacatggggaatcctcatctgagttgagaaggatatagcaatcttcagtagccactcccagggggcctctgtccaggatacaggatctggacagagaacaaagcaaataggactgatgtctccatcctcggtagcatctctccaatctgctcctatccctctcactctcctaagctcccctcaagtaggtgatcaggtaaattatcctctaaactaggaaaggtactattaatgattacatcacaataacaggtaaaatgggaggtgtcccaggcaaacaggaatataggatccccatgcccacaggccctctagttttgtatgagaaggtgcatctgtgtgtgccagatgtgtgtgtaggggtgggtgtaatttggtgggtgtgctatggggcgctgagcaaaagcagatccttctcctgcctagggttcagtcccttcctcagccctgtgtcccctctggcttcgcctgccaaggctctatcaggtgtgagagtacagagcgatggagctcctggctgagctgatgaggctcccagggactagagcaattaattaagcctcttcccagctctcagcacaagccccgtgccactgccagagccttttaattgccactggaatgggtagctcttaaaatcaacgtccttcccttaaaatcaacgtcctgctcagcagtgctaggagagggaggctggagagggcgtggagctggcctgtccagcagtccccacttcccttctggggcaggtcccaggaaatgcttccttccaatagcttcttccctgctgtgcccactttgggattttttgcagctatgagggtgttgacaaaattcagatagtcacacatgggagagacttctgagatcttagagcccagccaaagatccctgagggaaaggggctttctggacactcaggcttgctgggaggggaaggatgttccagctctggtcttggccgatgtcaccatggatggacgagacctggatctagctgctgcaggcgctgtggggcatgggacagagggcacacacagcactggctgtggagtcctgttgtgagcatccctgttgaaagaactaggcaggagactctcaggaccaaacagatacagtccaaggaacctggaaaattgcatgaagagccctgggccaggccttcaggagccggggcctaggggaatcaggctgcccggagcagcctctgtgagagctgctagggatgcaatgaccttaaagctgcctctcgactctgagattccggactgtgattctgcgacggactcaaacccagcatccaacgcggaacaatagctgtactcctgcccttcccgaccccatggagggaggcggtggcacagttctatctacacagccaataatgcaaaaatcacctcatttggaatgcattaggattccaatttacaacaaatttcctttcctaaactagcttggctttgcagacatgtgtctctgacagcagaaaaagggcagggtccctgcatgccaggccagaaagagggacctggcaaggaatcctgaattttcaggtgaaaaatctgctttaggcaaactgggaatgaatgctgatgtaacttggagtgtatgtgtgtgcgtgtgcatatgcacgtctgtgatgaagggtctgtgcatattgcgggaggcagagaccctggaggccctacccagtgacagcaattgcagatgatgatgtctgataatcatataatcatattgataacaaccatcatctccctcacccttgtggtggctcaataatttcacccatcactttggtttgtcttgtgcttgggcaggtgcactagggccccgtcttacagaagaggatgctgatgaccagggaagcccattaataaggtcccactgctggtaagtgacaaactaggattggtaggctgctgtctcttttggaggccctatgctggactgtccctgaatctgacacacttgggcagagttgggctaagctaggccagctcccggaaaaagtgggttttagccctgatgaggctaaggaagctgctgtgagggtggtgtcccatgcacccttcaccatccagggctgtgaatcatcatccaggccttggggatgcaggatgggtgttggaacatatgacagctttgcacatttatttgtgctcctgacaacatgagcagagaaagctgcaggctattgacttgtagtctgagggtctggagtagatgtcccagtaccccatcaatatggcagctctgtcttcattaaggtcctggacaggggcaagacctagcctgctaagtgcacggtgttctggggtcatggctctctaccagggtaccccaggccaaggcaaggcatgtggagggtagcctgggctatgagcagccatgccaggggcgccgtccttgctctctctctttgagaactgcagaattagctcctggtggtgggtggccaagcccggctgctgccagatggcagcagaagggcagcaggcacccccttcttggtgcccgctgaactgtgacaaacctgggcctctcaggctggagcagagccggcctgcctccctgtaagagtccagctgtgggacagggtggtgtgtggggttgggaggggagctcatagagggtcaaggaggcaaagggctgtgtcagatctactggccagaagtgagagaagatgtacctcaaaatggcttcatgaagacaaaaagggcgggcatgcctctcattggttccctttactaaaatatccatgtcagcaggcatgtctctcattggttccctttactgaagtacccatgtcggcaggcatgcctctcattggttccctttactgaagtacccacgtcagcaggcatgtctctcattggttccctttactgaagtacccatgtcggcaggcatgcctctcattggttccctttactgaaatacccacgtcggcagtcatgtctctcattggttccctttactgaaatacccatgtcggcagtcatgtctctcattggttccctttactgaaatacccatgtcggcagtcatgtctctcattggttccctttactgaaatacccacgtcggcagtcatgtctctcattggttccctttactgaaatacccatgtcggcagtcatgtctctcattggttccctttactgaagtacccatgtcggcaggcatgcctctcattggttccctttactgaaatacccacgtcagcaggcatgtctctcattggttccctttactgaaatacccatgtcggcagtcatgtctctcattggttccctttactgaaatacccatgtcggcagtcatgtctctcattggttccctttactgaaatacccatgtctggccgaacccggggcgtgatggtgagatcgagatttggtctctggatttctcagctctgcttctttctgcattggtccctgctcaggcaattggggcaagatggtggcccacagcttcggccctgggagaaagagcgagcttctcttcctcaaccaataaaagccaagtttgtgcctgactgagtcacatgggcatccatggaccagtcctgtgctctgggagtcaggagtggggtcaggttcacaggggacatggggaggatgatgcgtcctaaagctcaagaacaggagtgaaggctgggtggcccaaggaaccatcactgcccattaacagggacagtatcaacctggatcagcccgaaagttcttgaatggaggtgtgtccagagaagagagggagggagggagggaggaaggtatgtgtatgtggatcagtgagtactgcaggctcccttcagagacagggagaacttagcaccaagcaccagggtgcagccataatgagcctgacaggccctgttcccaggagggcgtcaggtgtgcgtcatggaggtgtgtgtacacctgggtgtgtgtggaggagaaagggcgcacttgctccctggaaacaccacccacagaccttcccgaaccccatccacaatagccaatatttctctagtgcggtggacacaaggctttccacatctcagtctccctgggcagcaagtgaggctgacaccattgggatctccgttttaacaggtaaggcagggcgggtcagcactcgcagcaggtaagtgggctgcgttggctgcctgggttggattctgggctctgccacttacaagctatgtggccttcagatcactttctcaaccgccttgtgcctcagttttcccatttgtaagaggagctgatagaagcacttttcacaccatgtgatgagggtgagataagttggtgtgtataacctgctgagaaggctgctttatgtgttgcaggaaaagagatctgggactcgtatctcagccttttgggctcaatctcatggctgaaccagtgctttccagagcctacagccaggtactgtgcagctctgaatagacctttccagtggaaggctctagagctctcctgtggatgttctttcctgcagcctggagagcaagcaagtcagaggtcctctggggccagtgggccggtgctgagcaggtgaggctgctctaatggttattaaacgtcccagctggtgctgtgcatctaagtgcggctgagggcgggacccgtgaggcccttctcccatgatttcagcctggtctaagggctccgggggagtgggagctgagggttcaggcatctcttccttcaaagggatatatggaataatgcagaagatggaggcgtgagccaatggcatgaaggagccgggtggaaggaagttggactgtttgcctgctggggaaggaagggacactgcagtgccctgctgctgaaagtggggtccatgggccagcagaactgtcaccacctggaaaccctgtaggaaatgcagaacctcagaccgaccccagatttagggtatcagatacctgctttttcaaaaaattattatgagatagggtctggctctgtcgcctaggctggagtgcagcagcgtgatctcggctcactgcaacgtccacgtcctgggctcaagcgattctcctgcctcagcctcctgagtagctgagactacaggtgcatgccaccatgcccagctaattttttggatttttagtagagacagggtctcaccatgttgcccaggctggtgtcaaactcctggcctcaagcgatcctccatcctcagcttcccaaagttctgggattacaggcgcaagccatcaggcctggccagagtctgcctttttcttttcttaatttaatttttttttgagatgtatcactctgtcacccaggctggagtacagtggtgcaatctcagctcaccacaacctccaattcttgggttcaagggattctcctgcctcagcatcctgagtagctgggattacaggtgtgcaccatcacatctggctaattctttttgtattttttaataagatgacttacatgcactgaaatgcttgagaagcacagtgttagttatcgaccccagggaaggtttcagttacccccatcatactgagcttctactggagttccaacaactaagagaaagagcctctgacacaagtcagcgggcgaagctctagacttcatttctagcactgtgctgcccaatatggcagccatgggccatgtgtggctattaaggtcaaaggtatagtaatggagatgaagtacagtgacacatttcagtgcttcggtcacacaagtcgcatttcaagtgctcagtagtcacacgtggtttgtggctggtatattgggcagcactgattactgaacaattcccttatcacagaaaattctattgagcagtgttggtttagtgtctgacagtgtagtcatgtgcagagaatgacccaaccccagctttccctgaatggcggcttctctctttggtggcaggggcatgggggtgtaggtggtggatgggcaagtgacagatgtgtggaaactcaaaagtgtgtgatttgggtggggaagggcactgcagccccagaaaacagctgcatgagtgagaacatctggtgaaaatcaaggcttgagttagttcatgtgagacgcactggaaggatgttagagatcacttagctcaaatctccccgtccccttcctatcacccatttaataaaccaagacctagaagtctaaagaaaagtgcagtggctagacttgaagttgggttttgcacttcaagaccagtgtttgatgtattctgcttgtgggacagtgagacaaactctttgcctgcaaagaagatttcatgaggcgagtaagaggtgctcgagaagacatcacatgagagagggccattcaggaacccaagaatttgcctatagacttgggggaagatggccagagaaatctgggggaggcactgggaaagaacatttcatggtgggggcagaaggggtgggcagcagggggaaggaggacctaggctgggaagggcccagctccatccctgaccattcgtctattatatgacacctgcatggggcagaagccagggaatgtttcacagatatgcctggtctcttccgctttggtctgcatttctgtgcctccctaccctcccccagttaggtgggtccaggagactgaactctgacccatggaatctgggcagaagggttgctgcaatttccagggctgggccctaaaaggctctctctgccttctctggtagcccacccagatgcagttgatgcagtggaggactctccagccctagaagactaccgagatactagaaaggaggtgccttgtccccaaaagactgggaggagtggaacatcccagctagctcactttaggctattactgcaagaaattaaacctgtatagtgttaaaccatagtacatttgggagatgtttgttatagcagctggtctaccctggctaatacactgcatgaagggtgcgctctaaaatttccatctcttcaccatgtcccatagcatttgcaagatgtttgtaggtcactgaagaggccattcttttctcttccctccctctgtttctctgttctcacttcttcctgtctaggagttctgtagtcatctctaattggcccttcaggttccccaatccagaagcagttcctatgaaggcagccccaggttattgccatattcatggagttatcagggttatggcaggtcctaggacagaggaagtccctgcccatcacttcctccaggaagccttccctgcatgtttgggttaggaaccatcctgtgcattcccatagaatatagtcaatgatgcccacattctttgtggcctgctgtaccgtaacatatacgctcagtacacaattgtggtttacttatctctcttgtcactccactgtgggatcctagagaactccatcacttctactgtgaagcagcaagagctagacatgtagatacccactgtggaaggcagcttctgatatggcctccaaagaagcaccctcctgagattcatgtccttgtgtcatcctctctcctccagtgtgagccagacccactgagttgcttctaatgaactgaatacagcaaaagtgctaggagattaggctttaaaagactgggttatagtcctttttcaggtactctgtctctcattctccttcttgcctgatcaagatacactctttgatgaagtaagttgccatgttggagaggcccgtgtggcaaggaattgagggtggcttctgaccaccagccagtaaggaaataaaagtcctgagtccaacaacccataaggaatggaatccagccaacaaccacagaacgaggttggaagtggattggctccagttgagccttcagatgagatctcagcctcagttcacaccttgattccagcgttgtgagaaaccctggccagaggacccagttaagccatgtctgggttactgaccccaaaaaactgtgagataacaactgtgggttgttataagctaatatgttacagggtaattttttatgcagcaatagaaaactaataaaccaatgaagaatattttaatgaaggaaggaaaattggtcctcacaagcagtagggtaattggggttgggttggtggcaatgcaggacgtggaagagaacaatgacatgaaggtgaaacttgggtggggacagggagtgaccagatgaccaccacggccctctcagatggggctgcccagtgatggccctggggacagctcctgaagatctctggggcctcgggtgggtgacagctctcctaagtctctgctcctgatgctgacaagccctcacactccacattctgtccacgcagctataaatattaaaacgtgccagaggagagattgcaaaataggcctgtgggcaagatacagctctgaattggggagaggaaatgagaatgaatttctctcttccagttcccactttggtctgtttattgcagaaggcgctgtgggagataaggagcagacagctcgtgccctgcaggctgtgcaggaggcagttccattgagggtcgcatggaggggtagagttgggtgtcacctagttcacgaggccgcgtgaggagtcggagctccccacaccatctcagatgctgctactgagtagagctctggggttcaagccctgctggtcccacaccagggcaaaaacaaaatataaagtaaaacaaaataaagtaaaataaaagcaaacagacaaagtactcctgtgtgggtaggtgtggggtggttttggggctccccagcccagagtctgagcactacagctggcaggcaaagtccccctggtccctctctgctcctctgtctcatacctcgagtcttcctgtccatccattcttctccagaaacttctttctcatccgctggcttcttttccattcctgccaccagcactctcatctgctcactgttcatgacctccccaaccaatgacttttcttctttccctctacacctctttaattcaccctaccagcagattcactttagtatactgctttggatatatcacttccctgtttaaaatcttctatttgtcccaaaccagggaaggacctatctggaactgttggtctcacctgcaaaccctcaggtaacccttctttttttttttttttttttttttttgagacagagtctcttgctgccgcccaggctggagtgcagtggcacaatcttggctcactgcaagcttcgcctcccgggttcacgccattctgctgcctcagcctccccagttgctgggactacaggcgcctgccaccatgcctgactaattttttgtattcttagtagagactgggtttcaccatgttagtcaggatggtctcgatctcctgacctcatgatccacccgcctcggcctcccaaagtgctgggattacaggcgtgagccattgcgcccagcatcaactttctagttgaggtagaaaggcctctttgtaccatgacctccaagcctcacccctgagcacccactccttgcaccagtttccctgtctcccctctgcccaaatgcaccctgagttattgtcttttttttttttctcctctcccagcctggcagttcccaaccagctcttcctcacgtgtcttcctgtacaagttatatcctccttcttcaaaactcaggtccaatcttacctctcagcaaatccatccccgacaattgaagccctaagtgctttctctgtcctctgaactcttatataattttagcctgtgcaattcgttcgttaattaatcatccactgtgctgccttgagacatcatttttttttctcctgtagccttgtgctgatagttaactctttgagggtgatttaaaatttgcttgtttatgtcttggcttcgtgcccccttgtgatatccttgggcatggatgccacggctttatactccttgcagcaacttcccaaggatcccagcactgagtgaggccggtcctgggactgcagagtgtttttgctggtttttattctctccttccatgggtcctgggacactattctctctgtttccccatttattcattcattggtgtctccttttaagggggcatctttcatgcttgtccttgaatggtatttccttggggttggtcctgatctccctgcctttctcacactccactttcaccctgaatcatctcagccaagttccttcttcccactgctgcttgcacgctggtggcaatcagtgtctccacccatcactgcttccttaaactgcaggtctctattggatctgtcaagctgcacattccacaggaacctccaaaccaagggacccaaacagaacctgctgtttgcagttgccattgcaaagtaccacaaactgggagacttaaaacaagggatttattctttcacagttctagaggctggaaatccaaaatcgagatgttgcagggcagtgctccctctgaaggctccgcaagaggatccctccttgctcctggggctccaggcaatccttggcattccttggcttgtggctgcatcgcctccgcctctgcctctgtcttcacaaggacttcttccctgtgtgtcattctgtgttttcacacggccttttaaggacatcagcctttgagaccctagatttggggtctaccataatccagtataacctcatcttaattaattagagctggaagacctatttccaaatgaagaggttccaggtggtcatgcattttagagggtcgccactcatcctggtacacccttagctcaccccctaacaagctttcttttggtaaattacatcccccctccttcccccagcccagtcacccagagccaagaagcgtggggcttatgcagattctcctttctccatttctcatcctctactccagtcattcttgacactccttagtcacaccctcctatccctcatctcccctctgacttgcgggggtggcccctacctgcacagcataggtcagtgtcggccaatcttcttttcattattccctgtcaagaagtcttttcctaatcacctgcccctatgaaattgcaatgccacagatagactgtgtgtctgtttctatgctgtgtgtatttttatgcctttaaacataaaggtaagatttctggcacgccccaagaaccaattttgccactttgggggtgatgtcacccccttatggaatgcatggtctgtgacaacagcctccaggtgatctccctccctccctctgctctgttcccacccctcccctcacccatgcatctttcctacttttataaaacacaaaaagaagcttgctccacctgaacagcgttgcccctgagagaatgtccagacctcttgggacagcatccttctgcatccagcgcagccaatggcccttccacctgctgctccagccacacagggagcagctgcattcaggcctctgtgcctggtcctgggacaccatctgcctgcacggcccccacctcttgcttgcatattcagtttgaattacatttcaagatgcaggtttagggtcactatgaggagaaagtgctctcctaccacccccaggagactggatgcccatccatccccactcgccacacactcaaaggttaagtggaacttcttcaaaaccatgtctcctcaggtagagcaggtgcctggaggggtgggtgcaacaggcagaggaaggagaagacagagctattcacgtggagttggtacccacagaacctggccagcctcccacagcggaactggtagcactgccatctctctgcctggctcaaatgtctggaaatcacggactgtttctcacccatctctgtatctccagagcctagcccagtcagtcagagcccagtgagtgttttcctggatgaatgaatgaatgaatgattaatgggcttctctggaccgtgtttcagctgcccagccacttcgcatgaactccactgttgctccctgttgccaggcacctccaaaggctgcctggtttctaccggctcatctcctctgctgaccaccttttcctccttcgggaggggtcactacacaggcacctgatccaggaggctggcttctctctatgttgaactctgctcctgtggccctggccctccttctcttcctattccctcactcttcaccttcaagctgagtcccgtgatgccctcctgccctgcccccccttactcaccacttttacccccgggccatgtgcgtgccattttcaggtgaacagctctgcccaccacctcctcaccctgtagcatcccccctccaggcaccctctccacctgtaaggatgtggtctttaacaagtgcctcttggccgggcacagtggctcatgcctgtaatcccagcactttgggaggctgaggcggggggattacctgaggtcaggagttcgagaccagcctggccaatatggtgaaaccctatctctactaaaaacacaaaaattacctggctgtgatggagcttacctgtaatcccagctactcaggaggctgagacaggataatcacttgaacccaggaggcacagtttgcagtgagccgagatcagcctgcagccaagatctcttttgtgatggagcaatactccatcacaaaaagaaagaaagaaagaaagaaaaaagtgcctcttaacctttgactctctctctgtgtgtgtgtgtgtgtgtgtgtgtgtgtgtgtgtgtggcaggtggggacaggcaggaaagaagggagagttcacaagaccctggggctggtcctgggtctcagtggggccttgaggaagaagaaggtgagttggctccactcacctccgatgcagggaggtggcagggagtgaggcggacactcaccacccatgtcagacttcacaatgtacagtcaggccccctgcttcaggcttgggttcctggacagaccatagacttagcctatattgacaccctggggagagggcagaagccctgagacctatgggtaaatatcgggtgatgtggtttgaatcggtgtccccacccaaatctcaggtggagatgtaatccccagtgctggaggtggggccttgtgggaggtgactgaatgatgggggtggattctcatgaatggattaacaccaaccccctgggtgctgttcttgagacagtgagtgagttctagtgacatctggttgtttaaaagtgtgtggcacttccctgttctctctctgggtcctgcacctgccgtgtaagacgcctgctcccactttgccttccaccatgagtaaaactccctcaggcctccccagaagcagatgccgccatgcttcctgtacagcctgcaggaccatgagccaattcaacctcttgtctttagaaattacccaggctcaggtatttatttatagcagtgcaaaaacaaatacatcagagcagcagcaaggtgaaggtaagtgccctttcgggaggcagatggggttggtggggaggaggctggacgagggtgaataggagagaggggaccaccatgttcaattgggacaggaatggaagaactgttcattacctaatcaccacctcccttccaggtgtgcagacccgccctctgcatgagggcctcacttgtggaaccagggcctggtccacttggacagatctgccagcaccagcggtcaccgccagtgctgctctagtccctggtgtgagtttcctgcaactgcggtaacacagtcttacacacaaagtgtgtaaaaaacagaagtgtattctgtcacagttctagaggccaaaggtccaaaataagtctcaatgggcgcaaatcaaggtgtcagcagggctgtgcttccctggaggctccagggaagggtctgtgcctcatgtactctggcttctggtggtggccagcatgctttgtcttggggctgctccattccagcctctgcctctgcgggccctgctgcattctcctctcctgtctggggtcgatcatctgcctctgcctccgtctcgtgattgcggatcggacccactcagataatccgggataacctctccatttttagaacttaaacttaatcacatctataaaatccttttcttgccatataaggttaacattcacatgttctagggattagaacatgggtatctttagggggctgttattctgcctacctcatcccctttggcctctgtgaattacatgagcgcctgtcaatcacagatccagggatggaggtggagatgtgtctggcaccccctctctcctgcacctgtgctcactgataatgggtgcagcttagctcctccttcccctcctatcttctccctcattttgggagccagaggactatttgggtttggaaatggtgctctgcatcactggaggaagcaagtgtgaaacctcagtccaccccatcactcaatcaggagaattcccattggacagctggcttgcatgtgggtgagttgtagtttgctaacatgttgagtctctgatccctgtctcttggttggagatgatgggtgcatcatgttaggcagtaggatgtggggaatcaggacccaggcctattgtcacattcactagggagagaactgtgctggcctcagctggctcctggatctatccaatcaaagaggagaactagatcactctaagcaaccccctcatagctccagcctcgctgatcctggttggttatgattcagaggaggggaaggcagactcgccgatgatcagtcagtgcctctctggagacaatcaagggcagctacagagatggccagtcccccaatccatgcagccactgagatggccagaccccgactccatgcagcttctgagatggccagcccttccctccatgcagcttctgagatggccagcccctccctccatgcagcttctgagatggccagcccctccctccatgcagccagtgacatgcccagcccctctctccatggaacttctgagatggccagcccctccctctatgcagctacagagatggccagcccctccctccatgaagcttctgagatggccagaccctccctccatgcagcttctgagatggtcagaccttcactgtatgctcgggactaggtatggaaagacagatagcaacagagagacacagtttgaggagaggaggagtatggggaagaaagaatagctgcaacataaggagtaccaggagtgcatgatttagagtcaaaagaactgggagcagaccccaacttcccctgactctatgtgaccttggagaactcacttaacttctctgagtctcattcagctcaactggcaactggggaatacaatccctgccttatagggtggccgtaaagatcaacaggataaggtacgtggatgaattttataaatgctctctacttgcaaagaatttctgctattccaaactccatatcctacctgccaagggttgcataaacttacgtgacatttagaggcttcttgaactggatgagggttggtgacttttgctgctctacgccctgaggaaatggaggaggactagctggacaacgtagggaaacccaaaattcattcatctgtaatgaagggatcggggggaagcagaggctcctaacctgacttagctgctgtttgttattcttgggaggaaaatccccaacctggttctgcttgaagccgggctgtctggagtgatgtcttgacaggatgatggatggtggctaggcacagtttgtgacactgaagcacatactctgcattctttatctggagctgctgccggcggaaggctgcaaataagcaatccagttataggaatccctgataaaattccattatgggccccagaaccaatcatgctggattcaatagcggggaggctgggaggcgaggcgcatgttgggagcaaagcactgccactggggaaattttccctgagcccgcaggctctcgcactgggaattccacaaaagtcggagactcaaactgtctctgacatccaactgtctttgctgtttgaaatgcgacaaaacttacacagggtggtagctgagggctgtgttgcagccagcaggcagagacctcaggttggagctgatttggttttattgagatgctggtttccccctctgacgtgtccataggaagctggttctgttgtgtggctcactttttttggcctctagctgatccagctgaagcccagtggtaaatatagcatccctcaccccttggagatttaggaaaccttgcttcaaacctcagtgtcatgcctgaggccactggggaccttacttgggcagacacagatacaagacacagcctttcaccctttccccagaaccatccactggcctggagaattttgtgagtttagtgagactcgaggggtgcagggtgggggcaacctcccagccttccacaatccctgggcaacctcccagccttctgcactccctggcttccccaccctcctgaccctggctctgtccttcctccccttccagtgcaaccaacacactcctcccttgtcttttacagagcagttaatcccccatcgggttctgaagtcctagcttttttcaccaggggccttaccatatcaaggagttttcaaaagcaaggcagttctctcactctaagaggaaccttctaccagctgctgggagggcgggacaacatctgtccgctgcacgcactgacaactaacgctcagaggtgctcactgtgggccaggcaggctgggagatgtttgcctgggttggctcatcagtgaggtgggtgctatgtttatcacgttttacagatgagaaaactaagtcataggtaagttaagtccctcggccaaggtcatacagtaaacccaggaagcccggcactggtcttattgtcatcaccgttatcctggacatagatgggctagagagagagagctcactcgttgaccttgcatccccacccggttattaatgctgaaaagccattccggaggagacgtgtgaccccgttctactacagctccaccccagctcttgttaagaacttccttcctggttacccaacagtgtgttgctcccaagagcaatggctgggccaggtcagtgctgggtgacctgagtttgcatcttcaactgcttcttcctgtctgctgtgacctggctgatccctcaaggagactgtcttccttaatagagggaacttgagacattaaggactcacttctgtgtccccctcgtttggacttggatcatgctgcaagcatagttttgaccttcacttcctggcccagggagcctgcaactgcatggggttagggcaagacctacacagatgcatttcgagagcacacctcagggctcccatgtttggggctttgaccaaattagcctttcctcttagatttgggagaccacctgttcttcccagcattcagtcatcccgggtttcctgactttgggctcacttctgacttgtggtttgtgccgtcctctaaaccttccctgaggtcctggactgccgatctgcctgatattgacatctggtaacctcgggggctcaccctcccgcttggggacctaacacacaggcacagcctggcagtgcagggcaggaaacgcagcagaaagggagctggccagtcggacaaacctaggttcaaactccacgtcctccacctgccggtcatggtgttagaaagtcaccagacccttctgggcctctgtttgctcttctgaaaatggagccactgatgatgccatcctcattcatggcggcgatgagggtttgaaacaccagaaggcatgtgtagcactccacagccgggatgtggcagagatggactcggtttcccttcttctgagcgttaccaagtatccctggccttttctcccttcctcttcccttcaccttcagcggcttggcctcaagtctccccgacaatcattgtcacttaagctgatgaaggtcttgccctctccctgctccccactgagccctgaggacgggagaaggtggaagggggttgttgaccacaacagccgggtcccctccttctcagacctctgtcccacttgctgcctgagacttagggtggcagaacacagcaggccttgcccaagcaggaggagaaggagaaacagaagccacatgagttgtaaattgaggtctgcctggatgaggggctgcccactttctgccctggtgaccattagcaccatcacttgggggcttaaaaagggggtctgtttgtgcagttgtcccctgcctcctttttctttttctcttcttttctttctttttttttttcttttttctttttagaagaagtaacagggattataggtgcccgccaccctgcctggctaattttttttgttgttgttgttgcatttttagtagagacaggttttcaccatgttggacaggctggtctcgaactcctgacctcaagtgatcctcccacctcagcctcccaaacctctgcctcttaccttccccgccctgcccttgttatgcatctcctctgctgggtgttgccatgggctgcactgcaaccccctcaaatccagatgtggacacccaaccccagcacctcagaaagcgactgcatttggagatgggggggtcttcaaagaagcgatcaaggccgggcgcggtggctcacgcctgtaatcccagcactttgggaggccgaggtgggcagatcacaaggtcaagagatggagaccatattggctaacacggtgaaaccccgtccgtctctactaaaaatacaaaaattagctgggcgtggccgtgcatgcctcccagttattcgggaggctgaggcaggagaatcgcttgaacctgggaggcagaggttgcagtgagccgggatcacaccaccgcgctccagcctggcgacagagcaagactccgtctcaaaaaaaaaaaaaaaatgatcaagctaaaatgatggtggatcctcatccagtatgactggtgtccttctaagaaggagagatttggacacagacaaacacaaagggaagaccatgtgaagacacacagagaagacagccacctccaagccaaggagaagagaggctcagaagaaaccaaccctgccgacaccttgatctcggacttccagcttccagaactgcgagagaacaaatttctgttgtttaagcctcccagcctgcggcactttgtcatgacggccctagcagacggattcatgcgccaagccgcatatcccactgaggtgaccaggcaggcttctgaagcttgggtggaagcccaaggaatatgggagaagagcaaggaacacggaagaaagcagagaggggcccccaggcagagcagagacctgtttccacggagcaggaccccagtctggcgtctcctttgttagaataaaaacctgaaagagggttacggaggaatttggaatgttgtgggatgtacttcggttgtggcagcagagcccagacctggcccaggcggggtctgttctgccatccacaggcacctcttctcctctctcttagaccctctggaatgaaaaggaagaaagagcctctcactcatgtttcccgctgtgcccacctgcaggtgagcggccctccctgctggtgtctttcccatatcccaggcccctccggttacagcccccatgggccgctcctgctcctgctccgcggccccacctccgcctcctcccgcccttggctgcccctcccaggctcggcctccccgcgccggttcacgctcacatttgggctccccggcttgctgctggtgccgtttcatttcccatctgctcacctccggctcatgagtaatgagagtttacaagttgagtttccatatgtggagcatttatatgttcttcttcaacaaggaggggcgagttcctccggcttcatggtctctgggacccagaggtttcctagcctgttgtcaaaggtacccccttccccacctcctccctcacacagccctgtcccttcggatcggcagacccagttgtgagcattagatattacttgttgggaggcctggatacgattttacattctctgtttttcatttttaaaaaacacttgttcagcaacattcacactgttttgttctcagatggactaggaaaaaatcaaatgcttccttgcgttctctctcaaatataaaatttagcgtaaattgtttctgcttcctctcccttctcccacgctctccttcctccccctcctcctcctcttctttctcttcctctttctttccctcctccccttcctcccgctcctcttcctcctccttctcttctttgctttctccttcccctccccctcttccttccctcccccctttctctcttcgtccttttcctcctcccgcactccttgattcaaatacttttctgaaggtcaaaggccctatatgaaaaaagattccctggctcagcaggacacacatgatacatttccattggggaaggccttgcccctcccactgcagcgacagctgtcatctgaacttttataccttggaacagatggggctcagggagcaggtgtctgggggccagtggagattgaggctgacagtcacccacctgtggctcctggggtgctcttacctgtcccccagcccctgtggaaggcagtatctgggagttggaacctctccttctctgcatttctcatggcccctactcaagttctagcctctggggcccacagtcctcaagggcccttgtctaatgctttggccatcgttccctcttcctgcctttcactctgagataggcctcactgcctggtgctcccctccacctgggtttggttctgatggctctccactgaggcaaaaccacctccttcccccaaattatcccccgaggacaagcaaatcagctgtccttccggttctccatggcctcattcagcctctccattttctcttgatggaaagtggagaggagtcagccaaggaggacagcagaggatggccagccctgctccgggcccagccagtgctgggggatggaggcctgggcttcggacatggctcagtaaggacagatggggaactgcagcaggattagcccagatctgcccagatcttcccagacgacttgcacactcccctatcccagggaaggaaagcgcacaccatctcattctcctcgttctcacgtcctgctgtcctgctgtcaccagctctgcacagcacaggtgcttaagcaggggatttaatcagcctcttggctaatagtccccaagtagtaattgaagtgggctgattggacccgtctattaggcccagggagctgtggggagatggcttttggagcgtttcctccgcctgctaatctatctgtctggcattttatctggagcccagagctcatgcttgagcactgaggcattttacagtattattattacttagcacttataacatacttcatcaatgagagggtcggcggccgcgccatcactctaaagcacggcgctccagatagagagatacggatctcactccgggtgtgtaatatttgatgtctgtgtctttgggttgcttgtgatcttgttattagttatgtttcctcaaggagaaaacctaccttcattctcctgatgcatgggggtcaggtggacgggaggcacagggatgggtgcaggaaggatgcacaggggagggcttagcttgggttcccccagaagcagacccaagacaaggggttgcatgcatttatttctttgggaggtgatcttgggaagtactagtaggggagtggggaaggagatggggacaggaagaagtgaatacaggatgctgtgctattgagcaggttactgccatgggcagtggggccaaattccactggggaacttaggcacctggaggtttcatcctctgagtccatctgacattggccgaggctgcttccaaggacattcactccccagccccttgagctcagcccctacctgggctgagagaagccctcaggtgagtcctagatgtctgtgccatgtgctgactgctgggtgcccaggaggtgtgggtggggccctggcagtgacagccgtggctttgaagctggacacaggtgttctgataagggaacgagcccaggagaaaagtccttctccctcatctcaaaccctgcccgctctgtgtgtcccttgcatcttagggcccaaggctgtgccacaaagtccaggacagtttgcagaggtctggggactgtctccagctcctccaccttccctaactgaagtggaacgttcaaagagaggcacagtgtgtggcttgggttcaaatgccgcctctggccccttctggctttgtgaccttgggcaagtgacttcatctctctggcccttagttttctcatctgtgaaatgggagtagcaatgatacctagcaggaaggtcttcgaaggttaaatgagagagtgtctataaagtgcctggtcccgtgtccagccatagaacaggagtccaggacacattccttcctcttccctttcatgcagggctccagcccccaaccaggaccctgaccagaacacctgagtccagtttccaggtctttggttttttttttttttttttttttttgagatggagtctcgctctgtcacccagcctggagtgcaatggcacaatttcagctcactgcaacttccacttcccaggttcaagtgattcttctgcctcagcctcccgagtagctgagattacaggtgcatgccgccacgcccggctaatttgtgtatttttagtagagatggggtttcaccatattggccaggctggtctcaaactcctgacctcgtgatccgcccaccttggccccacacctgttgagattacaggcgtgagccaccgtgcccggccctccaagtctttgagttacagagatttcctcagaggctcacattcccagggagctggactcttgtttccaggacactgcatctttcccatgcccagggcagggggcaccctgctgaccactccagcagccctgcctgatgcctgggcttgcagatatccccatgctcatcaggccaaggcagatctgcatggcatcccctgaggggccaatttatacagcagcttaagtatcttttaaaacttcttcccctccccggagatgggggaggcggctgctgctgctgctcaggccccaggctcttcttcaaagggtctccccgtaggcagatggaaaacttgctaggaaaagattttcctatttttttcatatatattttttcttggttgcaattcttgttcctgcctgattctctaccttccacagagccagcaggtaactgatggggatcagagctctcaaggcccctgggggcacctcctgcaggaagacttccccaattatcccacaagcattgcttgtttctgctccccgtggttttctggcttccttgtggccatgtgcttcacgtgtggagctcctctttgtggaccgatgagtgtgtgcgtagtgggaacttggtgtctgtctatccagggggatgacagtgtcttgaaggataggacttgggtctcatcctttctctgggctggggaagctgctgccgactggctgggggtgagaccgtctctgagcccacctgagggtgtctgcctgcccaggtaggctctggtaagagccagtgactctgctacataggggatccgtcagagctgaaaggtctagaagcccttcatcatattaaagaccaattctgtgcagattaagaggacacagcatctgttctcttgggtttggggaagccatccatcctcctggagcagctctgggcaggcggaggagctctgggcaggaaagggaaaaactcaggtggcgagatggtgaagagcagccttctcccgtgcccctgaagagaggtcccaggtgccccgagtgtccaggctctcatgtggctctggttccccccaaggtgcccagcactctgcctcctgcatggggtcatgctttcagccagagcccccagaatgctcaggggcccttgctgtttcttaagatcaactcatctgactccttccgaggctgagagctcagctctgttggggcgttgcctgccgtcctgccttcctcctttttctgcctggctgcgtggcggtccaggactatctggggatcggctgcatggtgggaaagggccacttcttcctggtagggctggccaggaacaaaggcaaggggactggggaggggaccgggctgtgctctatttatactgtatcttggggtagggcacattggcagcccagcgctctggatgcctcccagaagcctgagtggcggtggcgggggcatctgttcactgaaggaagggcagagagaaaagaatgggcacttattgattttcttcgatatgccaggcaccaggccaggcccctttgatgcatgatctcatcatgtaaatataggatggtggtcaggagatcagcttccaaaattgacagaactgggttagaattccagctcccccagtttctggctgggtagcactgggcaagtgggttcacccgcctaagcctgactttgttcctctgtaaagtgtttataatcaaagcgccttcctccaagaggtcctttctctaaagcacacagcagcatgctgacccaacaggacgtaccccgtgaacattaacgccttctgttatgaacgaccatgtgatgcagaaaaaatcatgccctgatttttggtagacgcagcggccaaagcctaagatgtgaagaaactcacctgaggccactaaattggaaagtggccgcgcggagatgcaggtgaggcccatgccttccaggctccaaagcccaggcccttctcagacgtcctccagcttccacagggaaagagataaatgatcccagggctagcgaggggcccggctgctcagccacactggaagggcagagagacccggctgccaagctcccggcagttgcatagctgggcagggacttttccttggagctggagaagctgctccaagatgggccccagacgtggaagatggctctgccgggacagctgtaaactctttaaccttgtgtggggcttcgtccttcagcagcccggtgagggatcagtggcaggtgtgatggcgggggaggtggaggtggcggcggaggcggccctgcactcactcactcacggcagaacagactctggataaacaattatagtctatttacctcagaccatatggtgttggggaacaggtgtgcgggtaatgaagagcccagctccaattaagcgtcggggaacccggccggattcccactgaatcttgcgcttgggttgaggcccacttacaaatgagagctaaaaggactgaggctcggggaggcaggagcgggagcctgaggggtgcgtggcagggccagccagcggcccccacccgctgctctgtacctgctggcaagctggtgcagcccagggacctcatctgggccttctccatggcaacttggtgcatctgggagttatgaaggtgaatgggtcatggccatgcacctcttggtgaggccgtcctgggacctgtcagaggggaagtcagggggtgattcctgttaagatcggtgggatggggcaggcacctgtcaccctctgtcagggtccttcccaccctgactcccccttggccttcattcccaacgattcaacacgtagttttgagtacttatggtgtactgagctaggcactggggatatgctgattaaaaagaagtagacaaaggccttgctctcattgagtttatgttttagggggatgggaagacaaacaatgagtcacattcatagataaagtcatcacatgcatgaagaaggtgagtcgcatacatggataaggtcatcacatgcatgaagaaggtgagtcacatacatggataaggtcgtcacatgcatgaaggcgagtcacatgtgaataaggtcatcacatgcatgaagaaggcgagtcacatgtgaataaggtcatcacatacatgaaggtgagtcatatacatgtataaggtaatcacatgcatgaagaaggcaaatcacatacgtgaataaggtcatcacatgcatgaagaaggtgaatcacatacatggatagggtcatcacatgcatgaagaaggtgaatcacctacatgaataaggtcatcacatgcatgaaggtgagtcacatacatggataaggtcatcacgtgcatgaaagtgagtcacatacaataagatcatcacatgcatgaggaaggtgagtcatatacatgaataaagtcattcacatgcatgaaggaggtcatttctaagcttggtaagtgtgaagaaagcaaatcatttcatctgcctgatggactcttagccatctctgcaggccccgttcaaggggccccctcttctgacacctcacgaatgcctggaggggtgggtcaccagctgccccgggctcctggtcactctcctgcacaccccattgccccattgcagccctcggaggttctgtaaacagctgcttctgtgccctctccttccagggcactgcccttgtccaagtcagggagggcgtctggctcgagtgctatttccagcatagcacagggtcaggccggcagatgagagggtttggtgagtgatacagcagcctcagcctcctgggagactggtctggcctgctgggaagacattgtccactctggcctggcctggcctgagcaggtatgtgagcgacaactgcagagagtgccagcctctggaagagccccaggggcctcatccgaccacggcgcccacaaggtgcccctcataagtgttctggaggctgcgagcacagccaaaaagatgaacagctcctgtccctgcggtgggctgatgagagtggaacgagggcacatgttccaatgaatctctcgtgtcagttttcactgcagcacaaacagagggaggtggggagtgcatcgtttcttctaggaagccccggtttccactgctgatgaggagagagagacagaaatggggatttttcacactcctttgcctggtgaatatttttgttttcgtttaattttggattagtgcattgctttaggactggacagatgaaatcagcatcttcccaaacttctctgctggaagactgtctggaatatctccccttggccctctgggggatgctgcccactccacagggctccctgaagctctgtctgattataaaggtaataccttccaacagaaatacacagctgggttataggaaatggataacagatgattcctaggaaaatcaaggtttcagatgaaaaacctgcacaatttctgggggtgcaaggtttccagagccaggattctggaaggctccagcctccagccctccctccctaacccagagggagggcaagaagcaaactaaatgggttctgaagtgggaaacaaattggatttttaaaaaatgctctggttctaatgatcgaagaggttattcataatcctggagtagaaagcgtatcttgaaatctatgttttgtgttgacagcttctccctaatgggcaagatctcacacatgatagagccataaaatgtggcactcctggctggccctgctgcttgtctgataagggagatggagggactcgccagcacaggcagagggccctgggtcttaccccgcccctgtgcctcctcccgactccagctggtctcggcttccagcatgttggaaggcctgttctgcagaacccaaagcccgtgttttgcaatgatgaggattccatgttcaagaaaggctgggaaatctctcccctcctagggattcaaaacacccatgagcacagtcatggctgtgaggaggcttccactaaagaaaacctggtaagctatgctcgacccggttgttctcagactcctttgactgcagaaccctgttttcacacaagccctattgacgtcctacagaacaaatgctttccagaacctacgatgcgtcatataacagtatccttttcctagggctactctatcaaaacaccacagactggggggcttaaataacagaaattccttctctcacagttttggaggttgggagtctgagatcaaggtgtaggcagggttggcgacttggctgtcttctccctgtgtcctcccatggtcctccctctgcacatgtctctgtccacatatcctcttcttataaggacaccagtcatgctggattagggcccacctcagtggcctcggtttaccttgattatctttttaaagaccctattgccaaaaatggtaacatttggaggtgctgggagttagtatgtcaacatatgaatttggaggggacccatttccgctcataacagtagcagtgggccttggcactatgaaacttggtattggggggaccatgaggagagcagaaaggtaggtaagtgggcagggcatggctgctgcctgaccctctgcatgcttcccattgcaacagtaatgacattaacactaactgcattttcacacctggaatcccagcattttgggaggctgaggcaggtggatcacttgaagccaggagtttgagaccagcctaaccaacatggtgaaaccccgtctctactaaaaatataaaaattagctgggcatggtcgtgggcacctgtaataccagctacttgggaggctgaggcaggagaatcacctgaacccaggaggcagaggttgcagtgagccgagatcacatcactgcactccagcctgggcaacagagcgagactctgtctcaaaagaaaaaaatatatataaaaccaggaagtgcatttgccagatatttatgcattacaagtacttttccatccatcaattaatgtgatccttttaacaacctgtaaggttggaggttctacagttatttccacttaacagagaaggatgcctgcactcagaaaggttgagtcactggtttgaagtcacccagtaaatagtgaagtcaaggactaaacccaggtggacttaaagaaccagtcccgaggattaatggaggattgattccctgccctccctaagatggaacccgcagttgctggcagcagaagcaagagtcatctcagaagggctctgagggcccctgccaggcagagcccgagttcccacaggtggcatttaccctgacgaatctgggcccaggctgaggcccacctcacttctcgccagcctggatggagagctgttcccctgagcttcccaagtgttttcagatgagtggatcctgctggctgctctaggcacctgcccatttgtgctgaaagccaaccagctgtgaaaggttgcagatttctgagctgtcccaggggtcgggtgtggcggaacggggacacagaccgagaccaccccagctttcctggactcatctcagaaacagaggcaggcccagcagtgagcattcttcaagaatgagcaacccaggtccaggctgactgcgagcgggaccagagaatttgctacttggaaggcaggagagggtggcgactgggttagcagctccaggaaaccagctgactcactttgaccatgtccatcctggcctggccacctgctatttgcttccttggtgcctcttgaaaaagtttgatgaccaggtaaaacccttgcctgccacgcccggaggctggctcttcatgaattcttcctcttggtcagaagatgcaactctctaggtgaccaggcctgtgcccgcaggccttgtgcctcccctggactcactgggcactcctgctgcacatctagtcaaagatgcttggcaaaggaagggcagatcactgggagggacggacccggagaccagtcctgaccccagattctgagctgtggagcccggggcagcggatttgttgccttcacctcaggttcatcttggtacaatggggctcatgaataaatgtcaaggtcattgtgaaggtcccattaaaggagaggtaaaaagctctttgcaaaacttcaaaacagctatgtaaatgagggttgttaaaagagcccaggaggcagagggggaggaaggctgggggaccagccgtaaactactaactggtgcagtgccagcggctacctagatgaggctgggtgggcaccgcaccaggcaggactcaccctcaacctccagaggggcttagaagaggaggtccatgaaagaatccgagtctccggtggttgtgtgcccagaaatacctggaaccaccgcagaacctgtacactggccaatcccagggggcactatccctggatactctcccatgcatggtgaataaggtgcagtggctgagaccctcagggaaaggaaccctccaccatgtgccatttcctcttcccaggactctctctgactctgccccaggcagggatgggaccgacccctgggaacctggtgtggcagcggtggggatcacccagcagaggttcagggagtcacccctcactctcgcaggaagctcactcgtgtcagtgggtggttcagttctggaacatttctctagagaggggggcccggaagtcccccagctggcttctttagggcaggctggggctagggagaggacagcgaggcccagggtgtggatgtaagcaggcactcacactcatgggcctgcctgcatgagactgacagagagcggtgccttagattccagggacttctcttgcctcacccacatgccagccctgcttttgggaacctcccttttcaagttctctactaaatgacaccacccactgcccatcataactcatcctatcctacaaggttaaaatcgttcaagtccttggctgggcaccgtggctcacgcctgtaatcccagcactttgcgaggctgaggtgggtggatcatgaggtcaggagattgaaaccatcctggctaacatggtgaaacccagtctgtactaaaaatacagaaaattagctggccgtgtggcgggcgcctgtagtcccagctacttgggaggctgaggcaggagaatcacttgaacccgggaggcagaggttgcagtgagtcaagatcgcgccactgcactccagcctgggaaacagagcaaggctctatctcaaaaaaaaaaaaaaaaaaaaatcattcaagtcctttgtctgagaggagacggacattctgtccagggccaggggtgtcagtcagactgatggtagatcacacagaagatgtactgaaagattctgggatttgtctttgcgtggagaagaggcgatgggttgagagcgtgcctttaaatatttgaatggacctcctatgggtcgattagtggcccccaaaagatttgtgcacgtcctgcttgccagagcctgtgaacgtgatcttatttggaaaaggaatcttagcagatgtaactaagttaaggatttcaaaatgagattctggattcaggggggaccccaaatccagcggcaggtgtcatgacagagaaaggcagagggagatttgggagggaggaggagaaaaccacagatgagagaggcagtgattagagcttggcagccccaaaccaagggacgcctgggaataggcaaggcacgatcctccccgggaggcttcggagagaacgcgtcccgccgacaccttgctgtcggacgtccagcctccacagctgtgacagaatcagtttctgttgttgcaagcccctcagtttgtaacaattagttacttggcagcaacgggaatgaacagctgtgtcctatgaaagaggaggtgggctagttccatctgcagccagagacttagcaaggaagggtgagagttccaggggggcatcttgcagaccaatgtaaggaagaatttccaagaacgaggcctgcccagcatcgatgtggctgccttgggccattctgcctcctacagcatcggactgaccacctcttgggaacatagcaggtaggactgctgttcaggaggaagggtgggttaggtcctccctccttagtggagacctgctgacagggtcccctgtgcgtgtgcatcatgacagtaattccccttcaagaaagcatgttggaatgcacatataagagtgatgtcttgataggaataactttgagtcagctctaatttcctttttcaaaaatggcattatttgcaaatgttggtactgtaactattaataataatttacttgcaggtagctcgcatttccccgggacacattgctgaagcttgtcacggtggtgagagagacctgtggtctcctaggaggcgtggagcagccttcccacactctctgcacatacacatcctcgggggatctggtccaggggcagattctgacaccccaggcctcagctgaggctccagacgctgtgtctctcacaagccctcggaggacagtgatgctgcaggtccacaggccacagggatccagagtggctgctggtgagtttccagaagacccggaactattatttagagggggcaggggaaggtatttcaccttgctacaacttaggctgggccagagctttcctttccgggaatgctgttgaacaaaaaagtgggacctggggtggctgagatgggcgtcctggagaagtgtgggctgggagacctagaagccacctttcggtagaataatctaggatctcaaaacttcctgggctcctgtcctgtttggggttaagggacttgatgagacaatgctgaaggaaccctacagctgactttgtggagcttgtctcccatgccaagctcttgccttagctatccgctttagtgctcacagcaattctatgattcaagaattgctttactaccccattttgcagaggagaagacagagcataaagaggttaaaccatgcctatggtcacccctatcggtgaagctgagatttgaagtggcgtttggaccccagagctgagctgattatcaccatgacattcaaccttccagaatcctgcagaccctcaatagggtgccctgccctcctgtccatgcctgggccttccaggactagcagagtggtgtaggacattcagggatgggccagggcatccttgtacgtggcccctccctaggtcacccccaatccctgctctggttggctccacacttttacatgaagccccgctgctcccagatgggggattagaccaggggctcctgttcagcttttcatgcaggaagactactgagcaggggctggctgtggaagaggggaaagttgccacccttgtctaaaattgccgctgcgggatggagaggaagattcctgcatacccaaggagaggttgaggctccagggagaaggagggagcagcgctgcctgagcacatgcccccagcgtgtgggctgctgggcagatgccagcatccccatcatttagggcctgaataaacagccttgttttactctgctctttgctgagcaaaacagggctccaaacccctcctggccatcctcaaatctcttccattttccaaatcctcaaacgcttgaggctgtatctctttggcctgtccaccatagaaaacaagaggctggtcccttcccaggcgaggagagcctccctcccggtgctcctgcggtcgccacacgtctccgtggctgactctttatagcaaggtgcagacaccagggatgggggttcagatgtgtgcacagcagggtctttggggtcagggagctcttcagggcaggcagagcacattctcaggccattagctggttgggccagagttcacctgccaccaccctgcccccagaccagcatcacggcagggtccctggtccctcagagaccccttgagagagcaatccccaccacggtccaggaggtagctgcaaacctggaaaaacaggacagactccaggagaagcacataagccaattaagagcccaggctggcccggcggctccagtagcacctgctctcatcttgtgaggtgcatgcggcttgggctgctgggaaggtacagtgcggcctaattacacactcctccgtgacaggcggtgtcaaaagattaaaggaatcaaaccaagtggctctccagtggcccctcccccaggaaccagagctgctgcgtgaaggtgattatggtaccaacgtagtggttagaaagataattttctctgggccctgtgcctgccgcctcctccactgagctgcgcttcggcactgcgactcggccaccttgtctgggcttcacagattccttttcttttttgttggcacagctgagcagaaggaaacaaactaagcagctctccctccaccagcctcccaccccaccacccacgggcctctcctcctcttccctctcctccccttcccctaccttcccctcccctccccttccctctcttcctcttcccctcccctcccttcccttcccctcccctcccctcccttcccctcccttccccttcccctcctctccccttccatcccctcccctctcttccctttctcacccctcccttccccttctctcccctcccttccccttctctcccctcccctcccttcccttcccctcctcttctttctttcttctcctctctctcctctctcttctctgtctcctctctctcttctttctctctctcctttctctcctctctctctctctttgcttcccattctgtttttcttcctagtcatctccattctgttctgcccctttcacctcctgtttggtctctgcatctcttttccttcccctccttaaagacctgtcagagttcaaggataaggaagccactgtgggctgcttcctgtttttttgtttttgttttttttttgttttttttcttttcttttttccgctctgatggtctttaaaataataacagcaataatcatgaccaataaccgtcctcgcctcttgccagcccgtgtagatggcttcccttgcatcacttatgatacgttatcagataaggaaagggaggaccaggggctctgcacttgcctcagggtttgtggctggtgaaggctggaaccaaggctgtgagctctgcctgttgactgcagagaagctaccgacctactcaggcctggggaaggaggagggagggatggtgggagaggaatatttgaaagcaagatgggggcgaggcatgatggctcattcctataatcccagcactaagggaggctgagacaggaggattgcctgaggccaggagttcaagaccagcctggccaacataggagaccccgtctctaccagaaaaaaaaaaaaaagagagagaaaaaaaaaaattagccaggtgtggtggcacatacccgtagtctcagctacttgggaggctgaggtgggaggattacttgagcctaggagtttgagaccagcccaagcaacatagtgagaccccatctctacaaaaaaaaaaaaaaaaaaaaaaaaaaaaaaaaaacgaaacaggaggaccacctgagcccaggaggttgagacggcagtgagctgtgagctgtgccattgcactccagcctgggtgacagagcaagaccctgcctaaaaaaaaaaaaaaaggcaagataagaaggcacctctgcaagtatctcctccaggcagagaggactgagtatcagtgagggaggggagcagggtaccgggacccccactccagactctgccatgcctctgcccaactttgctgcagtgactttgggcaagcatccctgatttacccggctatgggctgtcacccctgaggagggaatgccatgtccctcaggtgagcagaggaagggttgagagctggtcggaaccttcagtatgcagggaggggctggagctcctggaagacatgtgacttgcctaaggttattcgcaggatgggcccagagctccactctcctgcccttcagcctgagagtcctcattcacttctctgcaccttcagtatctgcagggtctttgccaaaacccaaacctccacaggggtcctctcacatcctttccatgatgacacggtgaccatctgtgagtgggaggaaagacgcccggaggggttggtggaagtgggcgctccctcacaatgacttctgcttctgagggtgtgaagacacagcttgggatttcaggcggagggtttgctaatgtcactacagcacacacctgctgggaatggtatcttggcgggggaaggggcacggagcggaagagggggatgcaaaacccacctctttctggtctcttccctcccatttccatcctactgcacttggaaacagagcatcagggagggattagggatttaaaaagtggccgttagaggaaggcaagagtggcccgcaccagctactgtggagtgtctccattaccataataactaaccacttaataactggcttccccactaattctaattgaaacacataatgatatttccgggccgagagtggcaagctcaagtctcggcagacatctccaggcgcacccccccagcttcacgtggcgaaaactgtgggctctccttgggtattctgttggaatagattcgggcagccgacaccagctcttgtacggctgccaggaaccacagctgatgataaaagccattaaaggtcagctgggaatagaaaaccatttatgttaaatgtcacagattaagccgcagagtgggccttgggcagggagcaaagggtgagatgcgaaatgctggtcactgtgctgcctctgtaaggtctggggcagtgggggggattgaagggtggaggtgaagccaggggcaggggagcacttgagttcctgctccctccagcctggggaggcaggtggatgctggcagccacaggtgattaggtgattggccaggctggccgccctgaggttgctaggcgacctgagggcaaggtgtggggagaggatggagtgggtctgtgtggcatcatcgcagaaggggacccgggcggtctctagaagggccaatgagatggaggctgcttccacttacagagggacccttgcaggctctttttctggagtgtggtcagcgggacagtgtgggtgtgcctaatcatgactgaggatgagtgtgacacaagtcaactgctcactgcagccacagccaggaagtcacagagaaacaaacaccacgcccccttcactaccttccaatggcctcggaagctgcagtttgaaggacacaggaggggctcaagtgggaggggtttcagggctcagaggagcctgggccaggccctaaagggtggctccaagagaactggggactctggttctatcgccgcctcaaaagtgcctgtgctccttaaacctgaacctgagtatccggcaagagcccctctgtgcatctctgctccgtcctttggcaaaactcacctgagaagccggtttgttgacaggtctgagaaaccccctggaagttaattagatcactcagatcccactgaaacaatgactaccatccttggtgacctacctggggagtggttcacttttgctggttgagccagagacttcgtttccgtgcttctccacctcccaccttgcctccagattgccgagctgttgctgtgtgcacagggaatgaaggctcattttaatattggtgcaagcagacatcattgggaaggtaaatctagtgggagaggggagcaggcaaaatgaatatcaccccaagccctgtcctgcagccttaagtccagtcacaggagggtagtttgaagcaggggcatgtttcctctgggaattgggaatcattcataccattggatggggcctgaaggagatactgaggttgtctcccccgaaacccctgggatggagaacagatctccaccagcgcaaggggtcccgggaaggccctcaccttcactcttcctatgagttgtttgacagcagaatgactgggctggaagtgacctggcctagaagcactcacaggaatacgatgggatggagggagatcccaggaggccctgagggtccagccagtgggtgctgtgtcaagatggtaggatgagtgggcttggtaggatggctgggggtgaggctgggatgttgatagacactaggaagatttatattgatttctgccatcaatagattcgtattggcaactactctgcaccggcccagtggctggcactggaaatataatgctaagtaagaccattatcctttcttctagaacctcactgagaatagggaagatcaatatgttcccgagtaattatggtacattaaaactatctctaggagagaggcagtgcaagggactcagagcacctagaagagcaaccaggaagatggggaaggcttcagaaaggcaacattggaaccaccgggccttccatagtcgaaaggagaaggctggagaggaaagtgtgggcaagatggtaaagagccttggatactgttcttaagaagagagttgaaagttaattctgaaggcaagagagaggtatgtgctgttttggggcaggagaatgagagggcttgtcctggattttagaaagaacactctagaagctacagggaggatgtgccagacacagaggttctcaaccttgactgcatcaaaatcatttggagggctggtggaaacacggatcactggtccctgcagcccaagagtttttaattcagcaaggctgggctgtggccagagaatttgtattcctaacaagctcccacgtgctgctgctttgggtcctgggaccacagtttgagaaccactgtgttggagagaggatctgtgcaggatctggaagcaaggagagcaggtagaaagaaatgggaataaaatgagagatgatgaggagactggcttgagagaccactgaggtctcggggcaggcagatggcgtggtgcagatggggagaggcagggctcagatgcagggagtgggtagcagaatcatgatatggctttggaggggctgaagcagcagaagatggtcaggacaaggaagtgcaaagccaggaaatgggaacaggatcccaggcagggctgaggtcccaagggagcaaggacagagccagagactggggctggggtcagagttccaactcatttggctgaggaggtgagcagtgggccaagactcctacactctctgcttttaggcaattaggcctcatttctgggagaaaaacacagctacaaatgggcctggttttgcaggtcaggagcacacaagggcgtgaatcccacagagcaggcccagaaatagcgtgggagagactctgattcactgtgtgcagtgaggtgccagcctagttaaagcaccctgtcggccaggcgcggtggctcatgcctgtaatcccagccttggggaggccaaggcaggcggatcacctgaggtcaggagtttgagaccagcctggccaacatggtgaaaccccgtctctactaaaaatacaaaaattagccgggcatggtggtgggtgcctgtaatcgggaggctgaggcaggagaattgcttgaaccaggaagttggaggttgcagtgatccaagatcacgccactgcactgcagcctgggcaacagagcaagactctgtctcaaaaaaaaaaaaaaaaaaaagggcaccctgttgctggcccctaagtggcagcccacccagcctgggagaacccagtcagacaggctttgttcaagacttaagccccagtgacacaagcgccgctcagacctctcttttagtcccaaggcctggctgctggtccaattgcctgtgggagggagacatctcccgggaagagtgaagaatccagccacaagcagagcagctggaagttgattccatttcttttcagcagcctaggagcaggcaaggggactggaaggggagtgggtgagcagacagaccccaggaaggggtgctcctgaggttttcagctaacagagcccagatggatgtctccaccaacttcctggtgctgggacaaccttcatctctgcctctgtccccaaggctgtgtccctgtgtcttagccctgacgtctcttctcccgtggtggtcttgccagtctcatccactcagtggtttatttaaagtacacaaaacatcagaccatgatttaaaggaagctggtatctagactttacaccacttagttatgttttaagcaggaggccctgagggtccaggcagtgggcgctgtgtcaagatggtagggtgggtgggcttggtaggatggctgggggtgagggtgggacattgatagacaccaggaaaagttatattggtttctgccgtcaatagatacgtattggcaactactctgcactggcccagtggttggcactggaaatataatgctaaataagactattatctttgcctctagaacctcactgcgaataaggaagatcaatatgttcccgagtaattataatacattaaaactatctctaggagagaggcagtgcaagggactcagagcacctagaagagcaaccaggaggatggcgaaggcttcaatgggatctgagtgatctaattaacttccggaggatttttcagacctgtcaacaaactggcttctcaggctagatgtggccctgactctagggcctcatataaagttttattacccacttcacagtggaataagttcgctgctgggcctgatgtctgtctgtccatctgccagtcaagaatacgtgcaggcactgctctgccggatctcctgcccatctccctcccagagttctcacccaagcacggttattcctggttaaccttcctgagcatctggctctcctaggatccaggtcttgaattgttcctgcttccagactctctgaacccatggccccaagctcccttgcacctgttctgctccactttcctgctcatggccactaccgggatttctatcccctccctgcccccgggttgccacctctgctccacctttggcagctggcctgatgggtacctgcaccatctctcctgataccaatatcagcatgggcatcttgtctccaatgcctgatcacagtttatggaccactccttctagactgaggtttctcttcggcccatggtgatgttataggaggctgtttgggctcccaggggaaaagggagcgtctctggatgggtggccttgtgtagaggagagctgacaggcaggaggcagcctggaaggaggagagggaagacactggatgacagggatgctggggaagggggctctccagcacccactgtgggtagcctggaggatggtcggtcccctccaggataatgttcattgcaggccagggctgccaggatagctaggcaggacaaagggttgccacgggtgggcaggggtgggtggggtggggtcggctcaccctggccagcatctgcctctgtcggggcagcagggaagccaggaaccctgtggctttccactgtcttctctttgactcttcagaagaggcacaatcccaagggaagataggattgtaacaagtttggaggggaaaagggaagagaaaccctaaaaccttcctaccaggactctcctctgagatccaaaacacactcccagaagctgacacccataagcactgactatggaccagactcagcttcaccccatgatccctgggccctgccaccatgaccctgagaggaaggaaccattatgatgatcaatttggaaatgagaaaatggaaactcagagagttgaatacctggtctaagatcatatagcaagaatttgggccagaactgcctgcccccatggcccatatttgcaactgtgacagcctcacagctaagcacaatcatttctcggagctccctgggccttggtggagccgggctgctcacagagatcatcccccaaggcgccgagaaccacctaagcccaatcattccagctgcatcccaatagttagcctttgacggggtcagcaaactttggctccagggccacatataaagtgttattggaatgcagctttgcttgtgcatttcagtatcgtttgtgactgctcatgctacattggcctcattgagtagctgaaacaaatgcctaacatgtttgctctcaggctctttccagaacgtgtgttatcgtagctcaggctgctataacaaaatatcatagactggggggcttaacagacatttgttcctcacagtttggaggatgtaagtccgagctcagggtgccagcatggttgggttctggtaagggatcttttcctggcgtgccggctgctgactttttactgtatcctcatgtggcacaaagaagcagccttgttctcttcctcttctccaaaaaacacaaatctcatcttgggggtccaccttcatgacctgatctaagcctaatctactcccaaagtccccacctccaaataccccaaataccattgcattcgaggttagggctttaacatacgacttttgcggtggcacaagtattcagtccgtaacatatgtccgcctctggactttgataaaatcacaagctcaccaacgtctagcagagcccagctgcgatggtgagggcctgtgtgtgtgcatatgcacggatgtagtgtttgtgcgtgtgtgcatggatgtaggggtgtgtgtgtgtccaagtgtgtgtgcgagaggcccctgacatcccgctcaggttctctcctgccctctccctggagaaggaggagtaggtgttgagtgggcagtgatctcctttctaagggaactgggttttagaggattttatagtcagagcagcacagtggctgctgctgctaccgctgctgctgctgctgaaatttaagtaattttcccctaattaagcaattatctcagagatagctgctcccatccccggaaactttcttatggagggcagggagcggtgagatgggggtgtagagcttgggaaggccccagatatagaaacactctagctgtgagattcctgctgagccaagggcagcagcagtagaggagcacgtggactccaaaggtgtacttgaacatgagtcaactggtcccaagagccacggttgctggagccaaacacacccatggcaaccgactcattacaggagattggagcccacaggggaccctgaggtccattacagggacttagggcggggaaagagagagtgagcaaaggctggggcattttcaaggccagaaagagagggaggcttcattcttccatggcaaagggagagccggaccaccctaaacagctcatcccgagcacaaaacttaccccaccttaccgtaaagactgtgtgtcgtcactggtgggactagttatagacataatccttctctgtaggctgacaacccacagaccccacaatcacttctgggagcctgaggctgcagcccagggctaggatacccagctaaagtggaacttcagagaaacaatggggaaaattctagtatatctcaaatattgcatgggacatacttatgccaaaaccctacccactgtttagttttgttgttaggcattctgtgatttgacttgctaaatctggcagttctacctagagcctaaataccttcttctcacaattcctaagctgagaaatgatcgtttgtccccaagcaatcgctggatccagtagaggcagcacgaggactgtaggccggaggcgaaggattcccagctctgaggattggtacaaaaatccaaagggtttcttgtagagccagtttgaggtggatatacggaccaggcaacctaacaaggtggttttgccctgggattcaaacataggaaaactagaaggggaaaggaaagaggcccttattttttggtgttaatcatcatttactacatggagactttttaaaaaaaaagactgggatgtttcttggttaaatggtgaaagggaaatgaaattgacagggcccttagctggcttgtccctgcagagactagagcttctctcttccaacagagtattgactcaacccacacatagatctttctgtgggaactaggagaacagagatgtccccctgccttcctgatgagaaacattgtcagagttactggcctttgatcccagactagcaagcataccattgagtccaggtcccactgggacatgagcaaggtggagattgttcagccctgatataaatgcgggaggggagcttcatggctccagggtagtcgtagaccccaccacctacatgagggaccctctggaatcacagggcatggtctagaagccagacaaaaatcttctctgatgcctttccctgggatgggagggggtttcagtagctggagtccccgaacgctgtgccccttggcccagcctctatcagcactggggttgacccactactgaaattcagtgggcgttccttccgctgctgccaatttcaccactgtcaagtgtggttacaggtgcaaggagtgggtgcagcagggggcaacaactcctcaagggagctttggcaggaggggtgcagccatggaccacgatggggattgtgcctggctggtgaagacccagggagtccccagaacagagagctctagggtgagacacagaatcctcccaatgccccacctgccaacccccagatgcagctggggttctagctggctccaggccccacggtgcccggagggctacagtggataaagtctgctaaaagttacactgtatttatttattccctagaagtacagagagacctgcataagaggaaagggcaaggcatatagagaccataaaaagagttgagtttttatgtagtggtaacctggggaattaatttctggctaacagaggtcgcacgacaataactgagttttgaacaagcacagttcaaaactccctggggaggtacggagaggccactgagccttgaaggcaggatggaggtgggtggagtgaggggtgggagatggccagggctggccttggggacatgggtactaggacccaatttcaaagcacagtaaggctaataactaaatgctggtttcattcagtccacatttattgggcacctactgtgtgcctaaacctgagtgaataacatggggattacagtgatggataaactggggccccactctcaatactgtcattgtcttttgggggggtaccaggaatgatgctacctgtgactgggccatcaggcatgacagatagagcatgacctgggaatcagaccccatgggcaggaattctgcttctttactataaactctgccaccttggcaagatgcttaatctttctccctcagtttcctcatatagaaaataagaataatcctactttctgcctcttgagattgtgatgaagatttatgtgaacagaaatggcctggcatgtaacaccttctatcaggacacacactctgagaaacagcttcactgagtttgaggcaaagtattatgatggtccagagtgactcatccagtggaggggtccaggaaggcttcatggaggaggtgacttctgatttaggttttaaagcatgaataagatctacatgaagggagaagagaggcacaacttctaggcaggtgctacaagctgtggcgggaagaataggaggggccacgtggcactgagtgcttgatgtcctgggggtgttctggccaaatttagggagcccccccttaaatatataaggctgagctcaggatggtgggcaggcggtgaccacacgtggggaggaaaccagagcacctggtacagtgcccagtcccggtcttctccagatactgatgaaggggtgcgggcatattttggctgaaggcagcagccctaagctccggaagacaccacattcaccaagtcagaaccctcgggatgggagccaaagaatgttttctagcactcagtgagagaacaggcccgggctacctgattgaaagacaccgcaacccacacgtgtagccttacattttccagcagccacattaaaaaaaagtgaaaagaaacaggtgagattgctcacaatagcatacgtcatttaacccaatatatgaaaaatgccatgatttccatgcataataaatataaaagaattatttatgagatatcttgccatctctttttcatactgggtcctaaaagtcctgtgtgtatcccacacttcaggcacctcactagcccagtgtccagtgatcaatagccacatgtggctcagggctgtcatatccaacagcacagtgatgaaatcacagtgaaacttctccactctccagtccagagacggccatctccccatggcctccgcagggcattctccaaactcacacatctggagccaatgcccacgggctcctggctggtcattctgtgttgtctgatactgttcatgttggtgaccttagtgctggccagggagggagtctggctctcttctattggaggtaattgtggagtggggtggctgtggggcctcagaacaccttggagctctcaaagaccctctcacatcttggccattcccacttccaggaccaaagcaatgattctgggaatcagctggggccaccactggaatagaatgaggcgatggggagagcccaagttgggaaaatggaatctttggtgactgtgggggatgtgagagccacagacaggagatcacgggtgcctctgcctgccacatatttgaaaatgcacaaagcaagagcctcccctctccccagcacacgcaggcacagggaagtgtgatcatggaatcaatttatttgtctactaatgcgccaggcactgtgttttataggtatgagcccatgtcagcctcacgacaacccttgagataggtcctatcagtgcctccattttaaagatgagaaaacagaggcacagagaggtgaagcatcttgtccggagtcacacagctagtgggtggggtagccaggatttggacctagggggagctccatccgggcaccaagtccactgtcccctggaaatcacatcatgacaaggggagaaggcagtggggagatggaaaagttgggaggctgttcaggaactggtgacaaggagggggaaggctgccatctggcaccaccatgcaggcagtcccagatggtggagaacccacatccactgcctggccgggctggaacaggatggggcgcagacaggcaggttctcggcagacaggctctgtgaagaaggtctcatgcttcccccatcccaccccaagggagtggcgagggaagggaagcctgtgacctcatcatctgggccaaggccaatgacatcaccaggagggcaaggagccaggcccagcaagttatttatggaaacggctggcggccaggcacagctcctgagctgtttcagatgtggctgggataaagcctccagctggcccactggggctgctgaggccaggcaggcgggtgaggatgaaggagggctggaggagggctgggggagtcagcccgctgatggggcagggctcttcgaaggctcactggggtccccagcggggatcactggggcaccatgcttctccttggcgtctgcccatctgtgtcctcccttgctcagggtggacctgtggtctctgcagcctgccatcagggtctgagtctggatgagcttagaaagagcagcatggagatttcaatcacaagccacagctcatgtgtgcatctatattcgtgtgcctgaggggatgtactgtgtgcatggctgttgtatgtgcgtccctgtcaatggatagatatactctctggtcccttgtatattgctcccctgagtggtcataggggtagttaagtttgtgagttcatggatatgggcatctctgcatgagtgtgtgtgtgtgtgtgtgtgtatgtgtttgtaggagatggggagaagagagagacagagtgcacaagacctagcaaataggaagagaggagtcacgaggggagagaaatcactgtaggaagttgggaaatataatttcagtggaggatacagaggcacttatggaagcttcagcaaaagtagacaaacctttcaatccatttatcaaaaatgcctgcagctctgccgcctgagtaggtgcaacaagaataaaatattgagcagaaccagtgattgtgggactggaggaggccaataaataagaaattactgagatgctcaccctgagtccaatgagtttgctctggcactccctctactcatcatgccctgtggtctcttgggtgctggctgggacaagctagcaggaacccacgtggccagatctctggcattttgactttaggacttctggaaggatgcctgggagaatcagggggaacagagctgccaagctccactcaggtaagctttggtgtggtggtaacacaggggccctgcttctcatgcctcttggccttgctagctgccctccttccctttaaaatcctccatgagggaacgaaatctacaagaccctgaatggagctttggtggttgatctatgggctctcgatggagcaacaggggtatgggaatgggagccaggtcatgaccaaggggctcccaaacctagaccccagcctgtgctatctacaaagacctcatcttgcctcccagatcttaggccttttgagtgatgggtggagggatgacaccatgaaacctcccactgaatgggaaccccatcctttggtacgtcctctttcatgtcatgaccacccaccccagaaaagaaaacgagcactttttcaaatgcccttaaacttgaactcaggatgagttgaaacaggatgtctcattgatttttttttcacctccaagtccacaaaagagtaatgggcacagctttccccctcccctcccacaccctggcaactgcccctcaaccccctgaccgatcacctgcttccctcacacccacacagcaccccctcaataacagaactagaatcgttgcatctcaatgccaagaaccacaatggcaggataaactgcccgggagaccccatccagggccatggctgtgggagtcacattctctaaccttctcccagctgtgatcagcagaatgggagaggtccagctgagtggctctctgggttgccaagctaaacacccagaaggcaggaaataagattaactctcagcaggaaatagagggataaaggttgactggggcagtggaggcgccaactggatgttccaagggacaaaaaggaggaccctggctctgtgggagcagcctgagctcacagaatccactccttctgctttcagaaacacagcagatgggaactccacttttttagagtgttctggggaggcaaatcccctatctacaagttgttcctagtttccctgcctcattgcagaaggcctatcttaggacccaagcaagatgcagtgttgttaggctcttggacctggaaaaggtcctgagctctccactgccccactgcctccactgcactctctaggtatttgtaaccgagtatgattgcatgtatatgggtctgcccaagcatgggcacctgtcccttccaaaggcaccctcatccttgggagggatggaggtggaacagcaggacgaacttcccagcagtcaatcaatctagaattctgaagacaatttcacccccagacggcaacaggatgagcaggatcagggagcagcactcttgtttgcagggctggtactctctatcacatttctagagcctgtgaaatgccattccaggctgctggtccaggaccgttctcctttccttgtttctctagccctgcttccatgctggacaggcctaagtgtgtagggggcggtggttgaggaaagttgatagggcaaccatcccaggtggctctttcctttgcctttgtaaaatctgtaagaagaggaagcagtcgttttcctggggcgctggggtatagccccatagattgaaactatgtgaggcacagcaccaagcagaaagacctggtttccatcctatcatctgcgtcccagcggctcgcattactggctcctttaaagactgacatctgggctttggccagtgctcagattgcaagaataaggagctatatctctagtgagatggtcggggggttgtcattgcaccagctttcaaagggcttttcaccattgtcatacttttctttttcagtcttacttaaggagatgtgttcaaacaatgatgatgatgatgatattgccgtgtgcttactctatgctagatgcttcacttttgttgttcatttaattagcacaatgatccaattaagtaggtattattatctccacttttcatatgaggaaactgaggccgagaaaggctatgtgactttccaatggccacgggtatcctgaacccaaacccagggctggatgactaccaagcccatgctattgctcgggcacttttctgcttctgcaagggaagtggtttcaggcagagaaagctaaaagctggcctgagtgattagctcttctcagggtgcagaaggcccagaacttcaggcagaggatgcacagccagcgagtgactcatctcggtttgcttgagactttttagcactgaaagtcttgccttctgggagccccatcagtctcgggcacactgagatggttggtaccctagatggagtgcacgccaaggacagtgtggaccaggtacagtggatggaccctggagaaccacctgctctgggtggttgaaggtagtgggctcaagtcagtgggcagaatgagatttgctggcaaaggctcttcttttttttcttcttctttttttttttttttgagatggagtctcgctctgtcacccaggctggagtgcagtggcatgatctcggctcactgtaagctctgcctcctgggttcacgccattctcctgcctcagcctcccgggtccacgccattctcctgcctcagcctcccaagtagctgggactacaggcgcctgccaccatgcccggctaattttttgtatatatatatttttaatagtgatggggtttcaccgtgttagccaggatggtctcaatctcctgacctcgtgatctgcccacctcagcctcccaaagtgctgggattacaggcgtgagccatcgcgcccagccaaggcaaaggctcttctgagcagccagtctgtggatctgaaggtcaccagcttgatctactcctgtctccactggaaacaatgtacaaatccttcaccacgttcatacttggctgcaagcatgccctgtgcccctgacattgctacgcctggccctggggccctggccccatctgaatctcatttccccttagatggtaaataaagagaatgatggttttctcagcctctcgtaccaccaacaatctccaccctctgtcagtcaagtcatagaagggtcatggaagggctgaacataccaggaatgttgccagtgctgggggcccacactgtcagatgcagggttccgggtcactggggacccagcgagatgggacaaggtgagaagaagaggaaaaggagaaaggcaaaattcccagccaaaaaaaaaaaaaagttcaatcagatttgtaaagggcacaatttacaaatccgtcacatattttactaggctgggatttacggattagcctgtaatacttaggcggctttttgtaataaaaccctgagccgaggcagtcttggggaagtgaggaggaggaaggaggcttctctctctatcttgctttcattttcccagcattttttgatctaggcagtcccattaatctgtgctttatctgcctatggagaaggattgagctctttattggatttttgtcaagaataaatgatttagtttgggatactgtggaaacgatttttgtggtattacaccatctaataaatgaaacagcagggatcaattcctttcttgcaatgtgttcaacaggcagggtgaaatatgccccacaattatttggtattgcactccatagatatttataaccgagtaggactgcatgtatatgggtctgcccaggcatgggcacctgtcccagatgatgtgatccattagtcccagagcatgagactagagacccaagtgacaggtcggtcagaaatgctgaccaggttcactcgaacagtcaaggctgagggctggagagaaggaatcaggtttgaaggtgagggctgcagttgagagactgtatttaccaaggcttgagtgcttttcctggagctttggaagtgagagaaactaacagggtgggacgtcattgccacagcagacctggcaaatgcctggtgcgtggggactctatgcagagaactgaggtcccatcccctacccatcctgggtacccccgtccatgtcccactggcctctctccctggacattgcttcgagggaaaatgtctggaagtttttggagaagggacctggctttctgtccaggtaggctcataaggtttatatccctgaagcctcacaaatatttattgagagcctattacatgacagcgcttagcacaggcctggcctgaagtaaactggatatagatatttgttcacagattgacaaacagaaagccttacaagatgcccttcccaggcgcaaacccacgtcaccctcacaagcagaaacagggaatagtaaggatgagggacagatggtcgctaggaaactgcagccttcctccgatccctaaccccaggggtaaaaacagaatgatcgtgaaggcagggagcggggacaggtggtcctgggcagcgtggcttatgccctgcccatggagatgcctgtgttggagatggttgcttacccaggtttcacacgccggacatcagcaccttggctcaaattgttgaaaacagtccccttcggtctatcagcgccatcagagacatgttggacgtgacacctttgtgagctttgtacacctcaatattcatcaaatgaaggcccgaagaaatggatgtcagtattagcaagattctttcgcccagagcttcgtggcgttggtatctccttggctggtcttgcctcccagctgcatgctctgtaaatgtttgtagtgagcgtgagacactacagctctctgtctctctgccttaagcccactctatttttatactatttggtattatctttgctggctgttttttctctgccacaatcagaattcttggggctcggtgccgacgggaggggttttaagtgtctttggcaggaagaatttcttctgtctgtagttcaatctgaagttcattcacattctccttgcaaagaatggcggatgcagtgagagttgccgtaaaagcgatgaaaaagtcatcggcaatccttaccacatccgtacatcggcagctcggaggcttgactgctggagcgagatgtggcccaagacgccccggtggaggctagggtcctcatggtgccatttgccccaactcccaggaggggcagggagacgatttcctctcaacttcccaggcggctttaggatgtcaacttgggtcttggcctggagccctttggattctttcatgtttttcttgacttgctaagtgtgctttccatcagttggatacggaatgcatcaaaacaatcattattatttcaaccacagcctcctctgaaagcgctttttcttggatataacacctctgtctcaaggcagttattgccattccaatgtgttatgctgtgatttcatcctcagagggagctgccacactcagaaagcaaacagactcttcccacatctcggcatagagcaaccctgtccttccagtttgttcttcgggccacacatctatgagccaggacagatgcatctctttctcccacactccacattccatccattgggaaatgctgccggctctgcttcaaactgcccagaatcccacatcattcttccccatttcaagtgcttttctccggctccagctgggactcctgccccatcctgaccctggcagcccatgctcagcatggcagccagggtgagccactcacagctcaaaccgttcagacctcctccttttcccagaacgagaattgggtcttcgccatggcctcagggccccttgcaatgtggcctgagtgaccgctctgaccaccccttccccagctgcccgccctacccaccccacagcagccccactggctgccttgccctatgatcaaataacccaggcagtcccctgcctcgggacctttgcactggctgttccttctgcctggaaggcttgtcccacagagacctgcatggctgatggctgactccattactgccttgagattcttatttcaaggcataaggcagcattgtgcagaggataagagcacagactggagccccactgcctggcctcaagggcctttgctgacatttactgaccacctgacactgcaaatggtatttcacctctccctacctcagttttcttctctgtaaaatggggaaataatcacattaattcatactgttataatgaggattcaatgatttaatatttgtaaaggacttatagccagaatgaatgtgaaataagcgactaccaaaggaataaatcaaatgagctgacatcaggcaccctatttaaacatgctggccagggccaggcgtggtggctcatgcctgtaatcccagcactttgggaggccaaggtgggtggatcactcgaggtcaggagttcgagaccatcctggccaacatggtgaaacctcgtctctactaaaaatacaaatattagctgggcttggtggcacatgcctgtagtcccagctacttgggaggttgaggcagcagaatcgcttgggcccgggaggcagaggttgcagtgaactgggatggcaccactgcactccagcctgggtgatagagcgagactctgtctcaaaaagaaaagaaaagaaaagaaagacaaacatgccactggcttctcacctccatcctacactcccagtctttctcctctcctgtgcttttgcttgtatttcattgtatgtatcccttcttactacataatttacttatttcttttggttgctatttactgtctcccccaaccagaattgctagaatacaagctccatgaggacagaaatctgtgttttgctcactatggtacctacatgcttacacagtacttggcctgtaagagtcgtttagcaagtttataccccctcacctacacattagaacttttcggttaaaaagtatgtgtttttttattatataaggaaaatatgtagaaaagttcccattacagaagccatgcatggtggaggcaccatactgaacgtaagagaattaagtgaaattctgagtcttggggtagattcttccagaaggtaacctgagatatggtgtattagttttcttttttttcttttattaatttactaaaaactatatgaaaaagaatgagatgggctcttgctatgttgcccaggctgatcttgaattcctgagctcaaatgatcctcccacctcagcctcccaaagtgctgggattacaggagtgagccactgcgcccagccagataaagcgtcttagttttctattgccactacaacacagtatgacttagtggcttaaaacatcacaaatatattgtcttacagttctggaggtcagaagtctaaagtgggtgtctcagggggctgagccccatcagatgtcagcagagctttttgtctttctggaggcctccaggaagaagccgctccttgccttttcgagcttccactggctgcctgcattccttggctcatggccccttccgccagcaaccacctcactcaggcctctgcttccttcatcgagtctcctctccgattctgaccctcctgccttcctcctgtagaaacctttgtgattacattagatctacctgtataatgataggatactctctctgggtaatacaggatactttccctgttttaaagtgacatctgcaaaccaaaaattgtgtatttggaaaaacgttaggccaggcacggtggcttatgcctataatcccaggactttgggaggccaaaacagttgggtcacctgaggtcaggagttctagaccagcttggacaacatggcaaaaccctgtctctactaaaaatacaaaaattagcctggcatggtggtgggcacctgtaatcccagctactttggaggctgaggcagaagaatcgattgaacccgggaggtggaggttgcagtgagccgagattgcaccactgcactccagcctggggaacagagtgagactccatctcaaaaaaagaaaaaaaaaggaaaaaaaggaaaacaatttttaatataaaaagtagcctgatatcctcaacataaaaaatatgaataacatgtatctagataaattgatctcgttcatgttaaaattcatatacccatacatatacacatacatgtgtacatttgtgtacaaaatacatatacgttatacataaatctctggagactatataccaaatgattaataggagttaatggcggggtatagctttcatgtctacataatttgaatttatttttcagtataattagcatttatttctacatggggaatgtcttacttttatacttcaaaaaggttttaaaatgaaaaatttaaactagacaggggctgggcgtggtggctcatgcctgtaatcccagcactttgggaggccgaggcaggaggatcacttgagctcaggagctcaaggtcagcctgcgcaacatggcaagacactgtctctacaaaaattagctaggtgtggtggcatgcgcctgtagtcccagccacttgggaggctgaggtgggaggtttgcttgagcctgggaggtcaaggctgcagtgagctgagatcatgccactgcacaccagcctgagggacagagtcttgctgactctgtttcaaaaataaaataaaaataaacagacaggataaaggcacatcatgggaaacagggagaatacagacatgtataaagaaggcaatctttgatatatttctttccagtctttcttcaacatatgacatgggcttgtgctcaatatataattttaaagcctaactttttttacttaattttatatcacgagcattttccatgtcattaaagattctttgcacatatattgttaatggctgtataatattccttcacagatatgtcattatttatttatccatccattccatccaccatcaactttcctcacaccctcctcatcccccattaataccctaactacttagatgagaaacggtggctctcacagtccctgctgaatgaatgtatatctggagcattctggagaatatcaaagtcaggagttcattcatataaatagggcacagaccaaagcaaatcaatatctccatgacgcatcttccttcaaggcacagaagcccttagcattgtgtttcagggagtaaggtgacctgccctgagctctctgcatcatctcacttgggtcttcatgtctcctggctttttcctggtaggttgccctgaacaaaactacctaaactataagctcatgaataaataggtttgggataaaaataaggttgggatacgagcctagtaattttccaaaaatagacctctctaggacttgctgcctgccctttgtttttattttttaattttttaattttttattttttgtttttgagacagcctcgctctgttccccaggctggagtacagtggcacaatctcagctcactgcaacctccacctcccaggttcaagcaattctcctgtctcagcctcctgagtagctgggattacaggtgcatgccaccatgcctggctaatttttgtattttttttttttaagcagagatggggtttcaccatgttggccaggctggtcttgaactcctgacctcaggtgatcctcccacctcggcctcccagagtgctgggattacaggtgtgagccaccacgcctggctgctgcctgtccttttgtatgaaaaggcaccattttggctatcaaagatggtttgcgggttggacaagaaatgtaggggagtcaatggatgggaagcgaaagtgggagcctcatcattttaacgagatttgtaactaaaaaagcaacacctctctgcagctgcccttgtggacaagggaagggaggggtcaggaggctgaggaggaacagccaggacagcctctcctgctgcatggaatcttccatccacttggtgactgagactacgtatttctggttgcacaggaagcgcactgacctgttctggtttggtatcaacacaataacagaggtaaccttaaaatagtttttctgcctttggaataaaaccttttgcaatgaacagaatctaggagaagaggttaattgagagttgactcacaatcttagatttgcagaaaagagggtcaggtggagcccttttgcaggagttatttacctcaaagcttcaacctctccaccctgtggattaagctgctcaaggctgagccctgccctggctcagtcctggtacccaggaaatgcgactgttggtcctacccacacagagagttataatctatgagtatatcatgaaaaaggaattcagtccaatattttggagactcctactttgacatcccctccttccctgggcagggaagatgatcttttcagcaacgggatccgctggagttttagaatttgattgggttcaactaaaaacaaaacaaataacgccagccattgttctgggaactatgtacacaaagataaataagactctgtgtggtcataggggtctcagtctagaaggaaaacatgtgaaaataatcacagtgagggtgtgagcattggtgaaagaacaccaatgttcttactttgctcattcattcgtttggcaaatgttaattgtctactgtgtgccaggcaccttgctagtgtcggggggatacaatgtcccatgacagatacagcccttgccatcatgaagcttatagtgagcaagtagacgttgagcaaataacataatacatctttgatttgcatttgtgacagaggtgttgaaagacgtacaggaagctatgagagtttaatatcagagaacttgtgagctcagataattccccgaagtcggcttccccacaacctcctgtctgtcctcccctcagcctgatgtgtgcaacagcctcctcctccaccagattctgaccttggacctcactgattccccaggtccaggctctctgcctctggagtgcagcttgccacacctgcaaagcaagcccagggcacctctgcctgatgcgcggctgaaacatctgggcttggcaggataggaagacgcagggaacagggctccagactggacaccggtcctccatccagctctgtcgcaaagtagccatgtggtctggattcctcccacacatcctgttcccttcagtccccaggctctccctacccacctctgcttgtccccacatcctctgcatactatgaggaagcaccacccacagcctctggaagcaggatgcttggcttcagatcctaccaccttgggcacatcactttacctctgtgtgcctcagtttcctcctctataaaatgggcacaacaccagcacctagcactcagggtggttgtgacgattaagtgtgttaatgcaagagcacctcacacatgggcccatggtacatgccatgtaagtgccagctgctctgctcattccatgtatcattttcccaccaaatcgatgtgacttcaaaggaagggcacagagactcatgccgtattacctgtaacatttagcgtccacacccttggttctcaaacttaagcatgcaacagcgtcacctggagggcttgctggagcacagcctgctgggccccttccagagcttctgattgtgcaggtctggggcggggcctgagaatgtgcatttctaacaagttcccagatgctgctgctggtccagggaccacactttgagaaccactggactaatttactactcagattgtattggcatccatctagaaatgaacacatatttgagcacctacaatgtgcccaccactgtattaggagcgttcgcatatttcattttattttcaccagaaagcagcaaaatgggcctcattctgcccattttccaccgaagttaccaatgctcagagaagctacgtgactctcctgaagtcctgcgacttgaactctgacctctgggtgtcagtttcagttgtctacttttccattgctttttgaacctagttttgggatagaaacagtaccaggggaacctgcagaggaggaaggagcccttgggaaaaggtttctcctaggtgatcagaggtctgcacgtgtctgatgtttattgtggagatgccagaaatccactgaattaggagacccagaggggctgcaccttgagccacagctcctgcccagtacgtggctctctagggccacaaagaggacacccagagctcagtctgggcaagctgcctgtggctcgtgagtggcacccccatagtttgagacccccaccccagcggaatgagctgggctgtctctccacctctcctccattccctgcactttctcccacagcctggaaaacaggtgctgcccattaacaggggaacagcgccaatcaggaggaaacactccgcattaagcccttgacacatgccacaattttgacaaataagacacaaaagcaggaggtgccaggagccccagagttcaggcctagctgctggcatgaaagaaggaggtcaggagtggaggctttggctgagaggagctgggcacggggaaggggagctgggagggggcccaccaggtgccactcctcacagcctttcatctgcctgggagcccggagatagacgctgcatgagccaggcctgagccagcagaactgttggcctggagagaggatgcagagcgctggcgaaccccaaccttaccgccacttcttaacctcactgcagggttccaagactctccccagcccaaatgcaaagagcctccaggatgctgatttgcatgtgatttgcatgctggatctgaggtccccgcgtctcctcccttcccctgtctccagttcctttctctgcagggttgagctccagcaggttgacaactaacctgggagaaaggagtggcttcctttcctatgctggggacttgtgaccccccatgtacagtacagcgaggctgagggagcagagggaagaggtgacaggaccacagctctaccgggtggctccttcaggggatttcagtgcctatgaggaaggatactcagctgtcccctggcgatctggttaaaatgcagattccagctcctcaggtctggagtaagacccagatccagcatttctaacaagatcccaaatgatgctgcctcccaggctacacttgagtagcaagggtgtagggctgtgggcatgtgggaatcccctgggggccttccacactgacactgggttccaccccagagattccgatataatggtccaggcttgggcaccaggagattctaacatgcgacttgagctccactgtgggacacctgtacccgtgtgtagaacaaagtgattgtaatgacgctgacctcctgtgaggagaagaagagatggaaaactcattagaggataaacaccggccgttcattcagccgttagagaactagaccaccaaaggagatgccgcttgctcctcgcactccacacacgctccaggtcatttaccagagagcaggaacaggccactggactgtcagttccaggaggaagggtcaacgatggctttgttcatggatacacctagtgcccagcatctgcaacatggtaggggtgggacggggggatgatggacagggggcaccgcaggaacggatgctggccagtgatggggagagcactgcatcctcatctccagcctgccatacttcccatcaggaggggatcttttctgtgactccagaatggatttgggaggacttattccttgtgaaaaacattgtcacaccctcgttaatcaagctttcttccttggcagagaggatggagaggaagaggaaactttcattccacagaagggcatctgccaatttcccacttggggacgagattgaaatagctttttcagatcctccagttaagctgacacatgtggacccttcaatcctccactgggttccctcccaggagcagttatctcggctccagcagaacggctctatctcaccgcagcctgccagctgtctcgcttcacaacagagagaagctggggccccaaagacagttctggtgcaaatagcgtcggagaagcagacgctggagcactggcgaggggagggaagggcggccaggtcagctgggccacccttcattcacatggtcagccagtgcctaggagctgtgaggtcttggggggggccacgtggagctgcagccggataacagggccagggctgagagtgatctgaagatgacagagctaaaaaagcatcactttaaggtgaggaaggtaaatgccacttctgggccggcaccgttccccaggctgggaatgagataatgaattattacccaaggaaatgaaaccgctaataaaatcaaaagcaaagctaggggaggttaaactccatttttaaaaaggcgctggtgatttatagagtgccctctctccttgcctcctagggcgccagcggctccccctgtccctccccctcttccccacctgctggcccctgaccctctggacatacagatcctggcctctctgccagctctccccagcctctggctgttcttttttctccatccccctagtgagccactcccaccctcaatgggaatttaaaggcttgatttgtgctgaaatttgggccaattgatttcaggagctcagtccccaaggaatggctaccaggaaatccgttttccttaggaatccattccgacctttgagccagcaaattacaagtagaaccagcccccgaatggcaatcaggttttggaggctggcgctgggcgggtgtggttcatgcagtgagtgactaattgatagggccttcgagcgggaacctggccctctcctgattcagggaagctcactggctacattttccttctcgctgtgtctgctctaatccctagcaagctccattcctgaaaccctggccccctcggtcttggctcccctccttccctgcctgaagccatcaagcccctgctgtctgacctcactgcccgtttccgtggcgacggccctgtgatgtcactggtggtggcctgtgagccttcaggtgggtaggatgacagcagcaggtgcccaggaggaggggaggaacaaagatcttgtttttgtgccatcatccctgatacataatgaaaacccagggtaggggtggggtgggaatggagtggggagatctgactctgcagccatccctcaccactcctgcttggacatcgccaggctcagctagagaaggcagaaaaagttcctccaactccttccccaggcacctatgcaggctccacactcctgcctgaacagctatgattttaaaagccatcgagtcatgaagagaagtgtgccagtgtgtgctggactcagtttcccctgtgcaccattttccccagtcagccctgcaccttccaagaactatgacccgaaggcacaccctagtcagctcaggccccacattcctgcaaaaataaggctccagggctccctcatcgcagcatgggttctgcaggaagccccagtgccaagtggctttcaaaactagcctcagctagcaacgtggcggctatttcagcgaccgacaaaagcagctcccccagcctcccttggtgtttgtggtcccttttgttccagccaggcaccatgaggaaaatgcagcaaccgtttggaaacaaaggctcgggcaggctctctccagtctgaaaagcccactttcacttgagtttcaggtaatttgctgtgcagcctgaattcgttagacaaattaggctcacttggacttcaggtggctcaattacctgggtgatttgcatgtttatgagtgaaggggactgcacagtagcagaaagcaaatttgaaatcctgactttgggggccctggagcccctttgctgcacctttactttccctaccagaaaggaggaaggacagagtagctccccagcaagcagatcagcggatgtcacataaccacagggcagtcatcagggagcacgacccctccccagggccacgcaggccttagtttctccttctggatctgccagcaaaacaaaggtaactgcctaagaacagcttccaaagatggaagaagaaagtgagaaaatctatattattgatcgttcatacctaaggaaaagaggcaagaggattcccatagcccagctgggaggtgaagagttaatcctataatctagtctgccagggagcaaggcaaggactggagctattttcaacccgaagtgtgcatgcagaatgcttgatgcctggggggaggagctggaaagcctgagaccatttgaaagcattaattgagtacccagggtatatagaccctattctcaggccatgctggaattccaaaggacaagggggctgtctcctgtcttctattagagcatggaccaccttcccccactttcaatttcttctctgtgcccactccccctccccaggccacagctccttcctgggctccgtgaagtacctacagatgcctgatgacctttttagagttggcccaattactcaactgaaacagcttaagcattgcaaattcacacacgcagactctgctagttgtctgagtaagagctagagcgctgggccctggctgtatattggactcacctggagaatgttttaaatgattggaacctgagtcccacccccagagagtatgatttaattggtattggatgcagtggcattttttaaaagctcctctggtgatttaaacatgccacaaagcctgagagcccctgagctggaggatttgggatttttgaattgtttaatgatgagtcgttgggctgaaattgatcaagtgtgatgggatcaagacaggcttagattctatgcacctggtgggctgctatcttgaaacaaaatagtgatgtaaggttttcatatgagtgtgattgtaatggatctacataagagttggtatgagtatagatttgcctggagtaaagtcttcactaaactggcattagttgagggaagaggtggcaggaagaagtaatcgatatttcttgagtatctgttgcgtgccaggaactgtgcttggaagactatactgatatttcatttattgtttccaaccacatggcaaatgggcattactcctactttacagatgaggaaactgagactcagaaaggataagtgtaattttgcctgagattatacagctattgagttttgggagacaattttctgagggcccctcacatttctgtgtgtcttgcaaagagagacactgactgcctttgtctgaactatccttataaggatgcttgcctggtgaacagctttggaaaatccaatatcttcctctggagcaaagggtaggcatgcttactgtccattataaaagattcctattccttaagctcaggattcctcttttggaacacagtccactctgtgtgagcaggtatcacctagggccctctttgtgctgccttatggagaccatggcttggagaattggcacaaaaccctaatactctggctgctactattgtgtaataaactgtcctttgtctctgatccatgagtctcatgtcttccaccagcatccatgaaaccgtagcaggccagactaacttgttaacttgcaaatggggcaaggtttcagaccccacacagttcttgacaatgtaatctaaatctgttttcctctaaaacctgtgcatttaagagatgggtaagcaagaggagatattaaaacacaacaaaacactctccatcaatgaccactttctctctagatataaaataacagaaattagttccctttctcctttctatgagatacataaacagattcattctgtatcaagagttaaaagaagtacaacacttgggcaccatgaggtgccctctgggttccaggttccatgtgattttcagttctgagctagttcctgttttccctcaaggatgtttcactggatcccatcaactggctctcggccttgataagaaaatctgggtctagcctcgcctcaacacccataccccactcactctgtggctgttagaagcctattacccccttgacctacttatctttcaaatagaaatgatctttcttcgggtgctaatgctaccggcctgcgtgacccttcatttgtgaccattcctctttgagaccagaattttcaaaagactgattataatcacagtctcattctcaatatttgcaaaaggcctttcctaacacaattctttaaaaccagctaagttaccaggtaagtcaatttcgaaaggatggcttcgtttcagtgctaattagcttctcttctgatggatgagaagtttacatgcaatgatttctagtagcaggttcgtataatttttcaccgctaattattaaaaattattaatcataatactcttcaggtgccagaaacttttaaaggtgctttataaagtatcctaaatctactctacaaccctaaaagtgaaatattttcactcaaagaagctgagatttcaaggttgaatatcttgcatgcacagctagtaagtggcagagctggaacccaaggtcacatctgtccagcccccaaagccagacttttctaataaccaactgtcccctttttaaaacagctttattgagatataatacacatactctacaattcgcccatttaaaacgtacgattcaatgggtttagtaagtcctcagatatgtgcaaccatcgccacagtcaattttagaacattttcctcacgctcaaaagaaaccctgtagactttagttatcaccctccatcactcctcctccccagccccaaccaactgccttttataaagtctctttctaaaaaagccaacgcgttttcttctctctgcattaaatgttgcagtatattcgtattcatttataaatgggttgcctttccaggttactgagaggttaagaattgccaaaaaagacctgtgccttccctctgatattccctgggtttagttcttctctcctccttctgccaagagaccactgagaagtgcctccgaagagctaagggctgccccaggtggttatgtgggaggtgagtttgggtgtgagttgatgatgaaagggttggggatcccagaaaacttcttccagcctggactcaagccttgtatctcatgaacagggaagagaccatctcctttcagacacagctagccctcccagagaagcccctcattcttccttctatagaggcaccttggggaaatttgactttgcccgaggaaggctttgccagagtggccttggggtcagtcagacttggcaaagagtttggcgtgcagatgttttcacttggtttcccccagaagctgaccctgaaggacatgagtgcttggagtttgggttgggaggtatagggatcactggtggggtggggtggggagggcactgggaagggacacaagaaggggaaggtggccactgaagggcgggctcctgaacccactgccccagcaggaaaccagctcttactctccgagtcaactctaggaaactctgtaaaacacccagctcagagttacccctccccctgtccagggatacagacactgggtgtggaaaacaccaactcccagcaggctctggtagaggctcctccaaggggtgcaaattccttcgctgtcctggcaagctacgcacatgtgggcagagcagcctctgcagttttggataaagttctcaggcagagaaatagacactggtagtgggaggttggctgagagcacaaaatggtcaggcctgggggatatggcagggggaatgaccagagcatctgcgacagcctggcccccatctgaacccctgcatgtgcaggtgcacccacaccccctccacacacacacacacacacacacgcacacgcacacacacagtgggataggaatatggctgcagtacagcaccttcctccacccctgggctcccctcttgctccctgtccatggtcagggtgctcctttgcatggtaatgaagttcattaaatgaggtttattaggaaccagctagtaaaggtctatgtcttttccgccgaagctggagaatttcccaaaaagcttcgtgaagagcttgaaaccccagaagagatcccttggggatgggagttgctccaggacagaagaagcagtaagctccacccacccgtctggggacacacaggaggcgttggatgtacaaagcttgttagagagctggctttcttttgagctgcagcctgaccagcctcccctgcacaggccctagaggctcagcagctggagggcagcctggaagtgctgtctatgcccaagggtctgagctgggaaggccgatcaccttccttggttcaacctctgaaagctgagagcacctggggctcctctctttcaggaatggaatggaactctgcagttttgggcagcccaaggccatgtctacttcattgctagttggcagaatatccattcattcatttcttcactcattcattcatctattattcactaacttattcatttattcatgatctatggatcagggattacagcagtcatgaaacacaataattggaatatgtaaacccttcaccttgcttcagaggcttaagagcacacatgaatctaaggtagtctagaatccctggcgcacctcctcagcagccccagcctctggctccagctctgtgcacgtgtaggatcatgtcttggctatgccagtgggctgtaaacaccattaggagaggacacaggtcctgttcaccaccacatcctcataacctagcattgtccttggcacataggaggtaataaatacccgtgaatgaatggatggatatgtgcctttgagtaaaaggctaattcttgtacatatttttaatgcattcctatatgtgtttgggtatcagtacacatttatgtatatgtcatagtttttgtatggttatataagtgtgtgcatctgtgtgtcatgtatgtatgtgagagagagttcttaatagacatgggctttctttcacaatatttcaagagaatgaacatttttgcttcctggtatctgactttgtaagtccaatctgcattttccacacatgtacagctctccagactttcaaatatttatattcctatatttaaaatctgtgaaatgtctctctctcaccacttatgcccttgtatgctctctcctctctcttctctttctctgtctgccctcagccctcccctccacctcatttcctctttgtccccagatatagacatacatatgggtgaatactcccaaactaagccacacttttcacttccgagttggagatatggagggatacacaggagccatcaacccggcctatgacaaatccctaatgataagcccagccagggaggggagcagcagctttggggcctgtgccccaaacctctgtgccccttgaagagaggacctgccccgggagaagtttcctcaggctgcagcagagcttggaaggaggaggaactaattgatgtttgcccagggcttcagagagatgcactgagtaaacatcagcattgcctgggtttaggcggcttagggtcttatctctgggaggttataatgtcttatgatgctgaccaagaggagaggaatccccccccaggatttttcgacctgagatagtctgtggaccttctctgtcccataccctatggccaagccatgaaccacccacctctcagtgaccagttaaaaaagacctcacgcccctccgtgctttttttttcttttgagacagggtcttgctctgtcacccaggctggagtacaatggtgccctcatagctcactgcagcctctacctcctgggctcaagcaatccttccaccccagcctcccaagtacctgggactacaggtgtacaccaccatgcccagctattttttgtattttttatggaggtggggttttgccatgttgcccaggctggtctcgaactcctgagctcatgtgatccacccgcctcagcctcctaaaatcttgggattacaggcgtgagccaccatgcctggcctccctctgtgcttctgcgattccctctaccccaaacgcttccactctccgtgtctacctgctcatctttcgtgattcagcttaaacatcttttccttcgaggtcccagactgagacagagtcccaaattctaagctctgagagaagcctgcaccaacttctatggctatggaggaagtttctctatggatgacctatctaggtgttgggctgtcctgctgagtgtatagaaagtgcaaactgctgtattgatctttgtcaccagagcccttgcacatagttgggctgaaatgaacttagggaccaaaaagggtgggccaagggtatagctgatgatggtgagaagataggcaatgtgttgataaggcacactgataagtgatttacaatattctcatgtttctcataacatctgtgaagatgggattatccgcattgtacacatggcaaaactgaggctcagagagccctgcaatgcatgacggagctgagagtcaacccaagtgtgtccaattccaaagccagggctcttggtcacagtgctgtatgtgtgaaaccatagcatatgcatatattattaataaaagaacaagcaagttagaaaacaaattttccatccattaggtgagtcaaggcttgaggatctggagactaagcaactctcaagagaaagttctgctgggacccctcccttggtcttccctttctgccccctctgatgcccccttcatccatccctgcctgccttctggtctgtccctgcagcgtgagtgccagacagaggcctgttctgatgtcctgacatgctacaattatgcagatttacacagcaagcataagaccttctccgcatgtatggcttccccattcccaagcagaccatgaacttcctaaggaaagtgaccgaattccgcacttctcaaccctcgcggaggggcagggagatggtaagtgactttggttaggtgctaccacctgtcaggcccgatggggggggtccttccatgagttttttttaagaatttgggctctttgaggtgtgttatccccattttacacaggagagcagccccgaggctcacagaaattagtttccttgtccaagatcacccaagtcatacgattaaccttagaaaagctttctgcctttcttgggatgaatattttgagctaggaaggaagtaaccgtttcctgtctttgtaatctgagaggaactaattggcgttttcccagggcttcagacagaggcacaggtgggtttctggaggctgggggtcttatttctgaaaagttataatgtctttacatgcaaaccaggaggccaaggcatccctcactgaggtttttcctggttgagacacaaaaacctgtggacctctgcatcctgaccctgtatctgagccatgactcactggccagggaagatctactgagaccagtaccaataatggagcccaattgattagaaccttgagaagccctaagtggagtgagaaacatttgacttccaatgggaaatccagatgcttagggtatcattcaaaataccatggtgggctcctcaaaggcatgacctcagctcttgtttcctagcaggggatcagtgactgagcaaggccaataatgtcaattccacatttgggctcttatggagctggccattccagagtcaggtgtagcaaaacaaaaccacacccctgaaaatgcagtattctgaagaatgggaaatggaaggggcagtgaggaggaagccaccaggacacccgcagccctgggttcgagctccaccttgctctctgcccttctttaccccgcactgggccctgggggttgacctgaatggaccacagcctctaggggaaggtccttccttgcctcctccagcttctggtggccctgggtgatccttgccttgtagctcccttttccctggagcagctcccaggactgctggcaggttcctgggggctttgtggaacaatataagaatccctggtagagatcagtgtttctcagcattagctatggatcagaaatggctgcagagctttggaaaaatacagaggctgaaatctcacctgtaccctgcggcacaaaccacaagggaaaggccccagtgtctgctggattccaggtgactctgatgtcaggcagggttgagaaacactgacccaaacattctgggctttatccctgggttatatcagatcatttccaggccttgcaacacctgttcactgtgtttactctagaaacgatgcagttggtggtgtctcccactattttagtctgtgttcaccacacagctttattttcttagacaatgagaatttttgtaaatgatcatgtttgtcttttgtattgactgcttggacccacaggcttaaatgtgcagtttaattttagcaatgacacaggtcctgtggctccaacagctgcagatagcctttgcctctgatcttagtttcctctattttccttggtcttaattttttattatacttcactgcttcatggaattacacatcggtaccaggaatagtttagggaataaagtggcatttacatttataaagaacaggccaggcatggtggctcacacctgtaatcccagcgctttgggaggcagaggctggcagatcacttgaagtcagaagttcgagaccagcctggccaacatgtgtaaaaccctgtctctactaaaaatacaaaaattagttagacgttgtggtgggtgcctgtaatattaatcccagctactcgggaggtggaggcaggagaattgcttgaacctgggaggcagaggtcacagtgagccaagatggagccactgcactccagcctgggtgacagagtgagactccatctcaaaaaaaaaaaaaaaaaaattatgaagaacaaaacggaagtggtgtataatgataatggagcttgtgtctgcagccacaggacaccaagtgcaggttaaagagacctcctctagctttagatttcctcatatgtgccacctcctccaggaagcctttcctgatcatctgaaccagatgaatcacctcatgataaatgatcctaactcttgttctccattaaaatgactcgttcagccccagtcttcctcaccagactgtgatttttgacatgagccaaaagcatgcctgtctttctcctgggtgtaaccccattgcccagcacacggcgtgctgcaagcataatcatctgataaatatttattggacgagcaaatggaaatagccgcaaaactcgactgctgggtgaaatatacaagaaataaatataaaggctgtgtgataagaaggtgactcacagagtgaggagagagaaggaaaaagaaaggcaggtgggagggaagaaaggagcagctggttgaaaagaagacagaacgggagctggcagcatctgagcagctatttacccagatcccagtgagagtctctacagactgtgtcccattttatcttcacaacactctcggaaggcgagccggctacccccactttacagatgaggagactgaagcttgaggcgtctaagctgcctgaaattcataaagcccaggagtaactgagtcagatctgaatctgagggtctgtggcttcaaagctgggaggctgtcccctgcagcacagggacaaatatcagaatcccaaagtggccacacctactactcatcctgccagggacccttccacctgctccacgaacagggttctcttcgcagagggtctgtttctgtggctggctgggcgagcagggatcagcggaaaaggaggtgacaaggcttcaactttggcatccctattcagtgagaagaatggagcacccagattataagagggccaactgggagactgagtaaggaggaaacacctcccatttcaccttgcctgtgagctgaggaggtagtaagggttgggcagctgctgctcccatcccgaccctcccagcctccatccacacctcctcccagaactgccttcagaggagccagccaggctgggcttgaggatgtcaggccaggaatggccaggggcccagaggggtgggcaccagctggggccttgcttcagcaacacagccagagctgtgcataccagggccagcagtggccgtttttccaagctgcagtggctgctgagccagaggctgtccctgtggattcttgccacctgcaattcccagtcttcatgggtgggaagaaggctcatctagacaccccaacccaaggagaagggtagtgccaatgcgtgcccctgggacaagaggactttatttgccctcacctgtgtcctttgatttggggactctggggaccctggccaagatacatgtatgtgctccaaagccttagcttcaactctagccatcggtcatccagagcttaattccttatgtgaaaacaaaaatgctagcaagagaatagaagccttggggaagttgcccagaatagaaaggctttaaaccgccagaaagcactgagcatttcaaatcgctatcctgagtcaactggtgccgaatcctctttcaagctttgaatcaacactgtccagctagtactgttgactcaggagggtccaagggttgaccaggggagagatagctgtgtgtggcctgggatcagagctctccaaccctactttctggagctcttccaacctggacttctgactcaggctgtacagcaaatattcttgttttcgctgatttctctacatgtgaagaatctgagtggtttggatcccaaccatttagatggatgactggacttatagccctcctggacccttgccaactatgattcagccattcttcctaccccaaagggagttgagcaacaaatgatatactgcagtttttgcctgatagatgcaatttacacatcagcaaaagcttcccaacaggaaggtctgacatggacgatggtgaacagcattccctgggcctggcatactggcttatgccagtaatctcagtgcttttggccgggggggggggggccgaggcaggtggatcacttgagcccaggagttctggaacagcctgagcaacatagcaagaccctatctctacaaaaaaaaaaaaaaaaaaagaaaagaaagaaaaagaaaaaaaaggacagcattccacttattctcaagaggtatttaaattctgaagaatttatcatcaccttgcacaaagaatggaaccaggagtatccatgtttcttctgtgcccttgaattctccagtgacttcatctttagctaaaatctcagcaaaatgtggaggaatggctactcctgagcagttttctcttggctccctgggatcatgtagcagaggtctggcttggtcagaaatactgtcctttccagagatatggtcaataggcaatagtgagggggagggagagagagaggatagggctgaagggggttattactatagagccagagggtcacatgtccctattcaattccacacaagaaggctcagctataatcaccaacccacttgcttccctacaaggtaaccatgtcacaaccagttcctcccagaggattcaacatcactgctcatctcctcagaccaatcaagaggattggtcattgggaagtcatcctgagctgtgaccactctctggaacccagaacttcctgcttcacatggactggatgaatgtctaggggcacagctgtttccagacacctggtttgtcttcagaatctcaaatcttaaaggctttctggtccaaccatccaatgcatggtgaggccccttctggattgcccctgcctgcagcatcctggtgtgtgcctacatatttccagggacagccaggaagattccatgcaattatgtgttccctgttccaggggagcccacagcttgatcaggggacagactgtatcttccatcaactcaagaactaagactcaaattaaaaaaatgcaaggctgggggccaggtgcggtggcttaagcctgtaatcccagcactttgggaggctgaagcaggcatatcacctggcctcaggagttcaagaccagcctgggcaacacggtgaaaccctatctctaccaaaaatacaaaaaattagccgggcgtggtggcgtgcgcctgtggtcccagctacttgggaggctgagatgggaggatcacttgaacctgggaggcagatgttgcagtgagctgagattgtgccactgcactccaacctggatgacaaactgagaccccatctcaaaaaaaaaaaaaaataaataaataaataaataaataaataaataaataaggggatctgaaaaggctctgtactgtatgcatagtactatctgacattctgcacaaggcaactatgaagacagtgaaaaaaaaagatcagtggtttcagaggtggggaggagggatggataggtggagcatagaggacttttagggcagtaaagcttttccagatggtattgtcatgtggatacatgccacacctttgtcctgaaccacagaatgtacaaaaccaggagtgaaccctaaatgtaaactgtgaactttaataacaatgcatcaacattggctcatccctcgtaaccaacgtaccacactaatgcacgatgctaataacagggggtgctggagtgggagtaaaagggtatacaggaactctgtgtaccttccatttttctgtaaacctaagactgcttaaataataaagtctattaattttttctaaattgcaggatgaagaaataaagagagggtgaaatcattctgggaagtttccttgaaaggggtgagtcataaagagggggttgggtgcaggtgaggaggaggaagattacagactgcagggatgagcaaataccatttcccaggatttcctgaagtttttctcccctcccaaagcccaaatctgcctctttctggggcccagcgaggaccctggaagacagagatcctagaaaaagcagagggaaaagaagaggaagagaacatggagaaaccgccagggaacagaactcttggtccaggaggcgcaaaccacaagtgcaattagtcaaaaaaaaaccctgaaattaaaaaatgattccaagctgaggaggggagtacataagttactgcagccccaagacatttatgaataatacaaatgctgtgaggtgctgagcctgagcacagttaattaatatgtacaggagcagagatgcacttgaaaaacaatagtgctgtttccccctcgccagaagtaaaaatatttccagaaagactgacacgtgtattattttctaacataattaccttattgtggagcatttgtaatggaacacattagagacgctaagcacctgcctgccttcccttaatgcagtttggttcagtggtgctgggcactggaggtgggaggaggctggcagggtggcagcggtgggggcgtctcgggagatctgtgcacacacatacttgatgccctttctctctccttcccctactcgctttccttaaaccaagcaaacatcctctcccttcctccttccattccctcccctgcctgccttactgccacccacttctagggacctccgtgagctagtgacagcctgaggggcaaagctgagagattcagggttccccgatgactggctgagagaaaacgtctgcagaaggagaaaaagcagaagccaccctctgccggaggagggagaagggatgagaggggacaggcctagggcttaaatgttcgccccaagacccagaatagcctagcacttcagcctttctgctatccttgttttgcaaggatgtagagtgagaatattgatctgggaggctgggaccctaggttctagtcctcactcttctagcccaaagaccaaaagtcactttgtctctgaatctccatgtcctcacctgtagaagggcaccagtggaggacagctggcctggctggcctccaacatccctgctgcccaatgtcctgagcacatcagccactcagccaagaggtgagcggtgtcatcctatccagcctttttcccccacagttaagaatgcctcgcccaacagatagatgcccaatttactctctcccaggagagaaatgcctgtcttctcccttccactcccattggctccctgccgtgcccagcctccctgctcctcccatcgccacacacataatggaatccagaaggcgggcgcccatgctgccatgtgcatggtgtgccatccctggccacgcccacctggccaggctccatccttggcacccgcctctcctcatcttttcctcttgctcctctccctcttgccacccttaaacactggccccctccagcattttgcccttggccctcctctcttcccattttctgggccctcctatggtttgattgcacagataaattttatatctgtctttaaatcccaacccttgcttctgagctccagaatttgtaaatacagctggcagtgggacatctttatctacttaagaatcactgtgcccaaatggagccctttatcttccccactaaacctgcttctcctcctattttctatttcagggactggcattcccctactctcataattcagaaatccaagaggctttccagaatcccctttctctttatatctcatactcatctggccacaaaactgatcttatgcccaaaatagcccaggactctctttcctgtcttcactgacactgtcttcctttcttgagcagattcatcgggtagtctttcatctgtacatcctccctactgagctcgcccagaggctggcacttgggtaaatggcagcaaatatttactgaatgaataagccccatctcaggccgttccattgtccacattgctagtggtccttctcctaaaatccagagataattatatctttgtcttgcttgaaaacctccataacatgccgtgacttccaggatagtttcaccccatgctgcctaattttacatggtttgtacaccctccaacaccatctccagcaggcacccatggcaataccagctcctgtgtctctaatcaaaggccccatctcatgcttttgtgccttgcatgtgttgtccctgttgcctggagcatcattcatccgccatctggtcaacctctattgtaatctaagaatcactattctgatgatctatcactatgtaatgaataaccccaaacttagtggcttaaaacaacaatcattttattaccatatcttatagttctgggcttgactgggctcagaactgggttctgttcttgttcgtggtctctcatatggctgcagtcagacagtggctgggctggagtcatcttgaggactttctcactcacatgtctgcctgggtcagtgggtaccacctacacataggctcttcatgtggcttgggcttcctcccaacatggtggccatgttgttagagcaagcatactgagagagaaagatcagcagaagcttcttgaccttttctaacctaaccttggaagtcctgtagcatcactgctgctacagtctactcatcaaggttgtcacaagggcctgcccaggttcaaaggaaggggatatttcacttcgtgatgagggaatggcaaggttctgaagagagcatgtgggatggaaatattgttgcagccactgagggaaaatataatctgccacatatgacagcccctcctccaagaagtccttggatgtccctttccctcctccaggctactcctgtgcctcttgctagtattccccaccatatgtgctgtcattattttttagtttagttcattgagggcatgggctatcttttacttatctttgtgcttcgcacatagttggttctcattaattgcttgcaaattactcactgaggaagtgagagactgagtatgacctgctaacccatagcaaggaatgttctttccagagcaggaagtgacttcccaggatggccaccactcaggcaattgtgggcagaagccctggctgaagctactcctcaactaaaacatacctggccctcactgctgccattcaggacgcctctcccatgtaagatctgttacctgctggcaggtgtgcacaggtgaagccctttgattctccccaataccacctctaccttcttgctcctgttttaaaatttccagcagtggaatgaaaggtggctccatgaaagagggaagagtgtgggaaagtttggagggttggtgggaggcaaagggagaggaagccccttcctttctccctcccattccccattggccctctggagccatggagcacagaaatatcccttctcatttcccggcaccattccccagctgcctggccaggattgctgggccttgggagcaattgtttgctgagccattcagcgggcagctccctcatgggcacacagccccactgcctgacaggctgtgtgcaaggggacaggcctgaatgactgtaatatgaaccatgaaagtggatattaaaggctttattacagggtgaggactgctaattgcaactttcctttcaggaagctggagctgatgagtttaagcagcggcacccaattattataactctgtcagcacagagcaggggaaaggtgggggaggggaggaggcaggctgaaggcacaattacctgaactttatccaaggcacacaccgctggcctggaatgttaaagggagattggttctgctctgagcttcctccctgtcacagctgtgttgttgttgattgctgatcccccagcccttctcccctgccctgcagtcttcttgtggaataggtggcacttgtgtacatcaaatgacacccaagccctccctggcccctgctgctgacgcagcccccttgctgagacctaaggccttccacggcaccttggaatcaagctgcccaggcttccattctttagatgggaaagtagactcagcgaagacaggaagttgcccagattacccagctcttaagcggcagagcaggaggtaaccggaggctccttaaaattcagccccaggtataggcactgcccaccatgtacacgggctgagtattctgatgtgctcccggaggaagaaaatgcagcccttgctagggagatgacttgtaaacagcatcatcattcaaactcatcattaccatgctctaagtgtgttcagtgctttacatttcacagagtgccttcagatattagtgtgttccagtgttgctgagcacctactgggtgccaggtgctggagacagagatgacagatgatgtttctgtctgcaaggagatcacagcttagtgggaagacacacaagccgaccgacaattatgataccgagtctaaagtgctagatagaggtgtcctcacacacattaccgcctttaatttaatcacataaatttaagtgagtgcacataaaaagctaatactacaaggtgtggtctgctcagtgtcagttgagcagcacagatagcaaaaatagaattgttccctgttgggagagctcaccgttgcacacggtggtcaacggtgggttcactaaaaaggcagctctgatggataggtaagaattcaaaaggcagcgaaaagggataggagttgggagtgatggggaagagagcaaagtttcttttttgcatccaactagagggtctgtatctgaaatattgatccctccttatccccatccaagagtattaaggttgtctttgtcatgatgaagttagagcagtgtagtgaacatgcaggcccctatgctgggcattgaagatgccccagaacaatgatgagggcttaagatctaggagtctttttcctcattgcacacagggcatcatcataacagattgtgatgaatgtaggggagtggacagaatcaggtagacctcattccttggacttgtgcgtgctcagaatgaacctgcctgactcatgttcctcagccaaagagtcctgatcaaccaggagatgtgtcccatgtactgagatgtaggacgtgaaggagccacaaatatgagaacggtggaatcaagggttcttccttacacatgtcaagcctgagatgactgctagataacaacatggagctggatggattttgacaacagttttggagttcaagaacaatataggctggtgatgggataatttgggtgtccttggcatctggatgggatataagatcataagataggaggagaatacctggagagagagaaacagagaaagagatcaggtgcacataggttgcactctggtgggggcagatgccagccaaagagaaggaggtgggaggaaagacaaaggaacatattgcccttcaggtgaagagagagatggtccaggagagagtggtacatgaggtagaattctgcagaaaaaccaaataaaatgaggattgaaaagtggctcctcaatttgtcaacatggatggccctggcttggatggaaaatttagaaaccagtaggagtggttggaaagtgaaaggcaacagccctattcaaataaactctgacccttacctcacaccacacacggtgaaattggcaccaagaagattgtatcttgtagtgttagcaatcacttgcatttatatgattaaattaaaggaagtggtgcatgtatgcacatctctatctagtgcttttcataccatattataattgtcaatcagtttgtgtatttcccacactaagtcatgagctccttgcagagagagtcagaatctgtcatctttttatctccagtgtaacttacaatggatcagagacataaaatctaaaactgtaaaacttctggaataaaacatacaaaaacattttgtaaacttaggataggcaaaaatttcttaggacacaaaaaacatgaaaaaaattgataagttatactttacagaaatgtagaaattctgctattcgaaaacacattaataaaatgaaaaggcaagccacaaactgtgagaaaatatttataacatgcatatctcacaaaagaattgtacccagacatataaagaattcttataactcaataatatgacaaacgattcaatgggaagaaaaaggaaaatatttaaacaaacacttaaccaaaaaaaagaaacacatgacaagattctcaacactattagtcattagatgtcttagttcatatgggctgctataagagaattccatagactggatggcttgtaaaaaacagaaatgtatttctcattgttctagaggttgtgaagtccaagatcaaagcactggcagatttggtgtttgttgagggctcactgcctggtcccagagggccatcttctagctgtgtcttcatatggtggtaggaacaagggcactaatcttattcatgggcactacccacccaaatcacctcccaaaggccccacctcctagtaccatcttggtgattaggtttcgccatatgaattcacaaatattcagtctatagcatcaggggaaatgtaacttaaaaccacaacgaggtactacattacatacctatcagggtaaaataaaaaatactatccataccaagagttcgtgagaagaaggggcaacttgaactctcacgtattgatggtggcaatgtaaagtggtccaatcactttgggaaacaatctgggagtttcttataaagctaagtatatacttcacatatgacccaacaattctacttctacatatttacccaagagaagtgaaaatgtgtgttcaagcacttgtatgctaatgttcatagtgtgctgtattcaggaaacccatctcacctgcagagacacacatagactcaaaataaagggatggaggaagatctaccaagcaaatggaaaacaaaaaaaggcaggggttgcaatcctagtctctaataaaacagactttaaaccaacaaagatcaaaagagacaaagaaggccattacataatggtaaagggatccattcaacaagaagagctaactatcctaaatgtatatgcacccaatacaggagcacccagattcataaagcaagtccttagtgacctacaaagagacttagactcccacacaataataatgggagactttaacaccccactgtcaacattagacagatcaacgagatagaaagttaacaaggatacccaggaattgaactcagctttgcaccaagcagacctaatagacatctacagaactctccaccccaagtcaacagaatatacattcttttcagcaccacaccacacctactccaaaattgaccacatagttggaagtaaagcactcctcaacaaatgtaaaagaacagaaattataacaaactgtctctcagaccacagtgcaatcaaattagaactcaggattaagaaactcactcaaaactgctcaactacatggaaactgaacaacctgctcctgagtgactactgggtaaataatgaaatgaaggcagaaataaagatgttctttgaaaccaataagaacaaagacacaacataccagaatctctgggacacattcaaagcagtgtgtagagggaaatttatagcactaaatgcccacaagagaaagcaggaaagatctaaaattgacaccctaacatcacaattaaaagaactagaaaagcaagagcaaacacactcaaaactagcagaaggcaagaaataactaagatcagagcagaactgaaggaaatagagacacaaaaaacccttcaaaaaattgatgaatccaggagctggttttttgaaaagatcaacaaaattgatagaccactagcaagactaataaagaagaaaagagagaagaatcaaatagacgcaataaaaaatgataaaggggatatcaccaccgatcccacagaaatacaaactaccatcagagaatactataaacacctctatgcaaataaactagaaaatctagaagaaatggataaattcctcgacacatacatcctcccaagactaaaccaggaagaagttgaatctctgaatagaccaataacaggctctgaaattgaggcaataatcaatagcttaccaaccaaaaagagtccaggaccagatggattcacagccaaattctaccagaggtagaaagaggagctggtactattccttctgaaactattccaatcaatagaaaaagagggaatcctccctaactcattttatgagaccagcatcatcctgataccaaagcctggcagggacacaaccaaaaaggagaattttagaccaatatccctgatgaacatcaatgcaaaaatcctcaataaaatactggcaaagcgaatccagcagcacatcaaaaagtttatccaccatgatcaagtgggcttcatccctgggatgcaagcctggttcaacatatgcaaatcaataaatgtaacccagcatataaacagaacaaaagacaaaaaccacatgattatctcaatagatgcagaaaaggcctttgacaaaattcaacaacccttcatgctaaaaactctcaataaattcggtattgatgggacgtatctcaaaataataagagctatctatgacaaacccacagccaatatcatactgaatgggcaaaaactggaagcattccctttgaaaatgggcacaagacagggatgccctctctcaccactgctattcaacatagtgttggaagttctggccagggcaatcaggcaggagaaggaaataaagggtattcaattaggaaaagaggaagtcaaatggtccctgtttgcagatgacatgattgtatatctagaaaaatccatcgtctcaggccaaaatctcctcaagctgataagcaacttcagcaaagtctcaggatacaaaatcaatgtacaaaagtcacaagcattcttatacaccaataacagacaaacagagagccaaatcatgagtgaactcccattcacaattgcttcaaagagaataaaatacctaggaatccaacttacaagggatgtgaaggacctcttcaaggagaactacaaaacactgctcaatgaaataaaagaggatacaaagaaatggaagaacattccatgctcatgggtaggaagaatcaacatcatgaaaatggccatactgcccaaggtaatttatagattcaatgccatccccatcaagctaccaatgactttcttcacagaattggaaaaaactactttaaagttcatatggaaccaaaaaagagcctgcatcgccaagtcaatcctaagccaaaagaacaaagctggaggcatcacactacctgacttcaagctatactacaaggctacagtaaccaaaacagcatggtactggtaccaaaacagagatatagaccaatggaacagaacagagacctcagaaataatgccgcctatctacaactatctgatctttgacaaacctgagaaaaacatgcaatggggaaaggattccctatttaataaatagtgctgggaaaactggctagccatatgtagaaagctgaaactggatcccttccttacaccttatacaaaaattaattcaagatggattaaagacttaaatgttagacctaaaaccatgaaaaccctagaagaaaacctaggcaataccattcaggacataggcatgggcaaggacttcatgtctaaaacaccaaaagcaatggcaacaaaagccaaaattgacaaatgagatctaattaaactaaagagcttctgcacagcaaaagaaactaccatcagactaaacaggcaacctacagtatgggagaaaatttttgcaatctactcatctgacaaagggctaatatccagaatctacaatgagctcaaacaaatttgcaagaaaaaaacaaacaaccccatcaaaaagtgggtgaaggatatgaacagacacttctcaaaagaagacatttatgcagccaaaaaacacatgaaaaaatgctcatcatcactggccatcagagaaatgcaaatcaaaaccacagtgagataccatctcacaccagttagaatggtgatcattaaaaagtcaggaaacaacaggtgctggagaggatgtggagaaataggaacacttttacactgttggtgggactgtaaactagttcaaccattgtggaagtcagtgtggcgattcctcagtgatctagaactagaaataccatttgacccagccatcccattactgggtatatacccaaaggattataaatcatgctgctataaagacacatgtacacgtatgtttatagcggcactattcacaatagcaaagactcagaaccaacctaaatgtccaacaacgatagtctggattaagaaaatgtggcacatatacaccatggaatactatgcagccataaaaaaggatgagttcatgtcctttgtagggacacggatgaaactggaaaccatcattctcagcaaactatcgcaaggacaaaaaaccaaacaccgcatgttctcactcataggtgggaattgaacaatgagaacacatggacacaggaaggggaacatcacagaccggggactgttgtggggtggggggaggggggagggatagcattaagagatatacctaatgctaaatgacgagttaatgggtgcagcacaccaacatggcacatgtatacatatgtaacaaaactgcacgttgtgcacatgtaccctaaaacttaaagtataataataataaaatttaaaaaaaaagaattttatttttaaaagcctcaaactaggaacccagatgtctaccaacaggagaatgcgtaaacaaattgtggcatactcatacagtggaactccactcagcaataaaagaggatgaattactgatatgtgcaacaatgacatgaacctcaaaaatattatgctgagtgaaagataccagacaccgaagagtacatactgtatgattccgtttatatgaaattctaaaaaaggtaaaactatctgtgctgatggacagcagatcgaaggttgccagggctgctgaggggagtggggattggctataaatagccatgaggacactttgtgtgcttctgcatctttattggcattggcgttagatgaatgtatatatttgtcaaaattgatcaaactgagtacattttgttgtatgtaaattgtatctcaataagtttagttcttaaaaaaatgggtccaccctatagtacaataccttatgctttccaaatgcatgaaaatacatgcactcccatatatatatgtgagtgcgtagaaacatccagaaggatagaaaccaaaatgactgtattatttgcctctggatagagatggggaagaggactcagagaaaggtaaggggccaatgggccttttgccttaattatattgctttaattttttaaaaggacaatggtgttcatgtattgccttgtacgtagatttttgaaacaggtgcacagcagatgtaaacagaggctattccactgtgaaacctcaactgaaagtcttttacctgtttggactagccatttcgttcaattatttattgagcatctatgtttctagcaacacaacgatgagacaagattcttcctgtctctgctctgagtcttccttcagctcactctaaaggatccagagagcccaaagttcaacacccatcacttaccagctgcgggaccaatttactcaaatttttaagcttcactttttctgcttcataatagcacctgtcacataagggttcttgagggattcaatgagtaaacagaggtagagtttggcagagggtttaataagcaagagctcagattcgtattttattattattattactaccatattttattgattctaagacagtgttttcctattttagtattccagaaattgggcacattttacaatcaatgtcataatttatttggcaggtttttttctttcttggtgtataaaatagtggtgcaccttacagttggtggtgtcttagattctatgaaatatggtgatagcatctctctctcttagccttcttatgaattcttgtcaatatttaaccaacatcagaaacgggaaaaagctaatcctcctaccagtctagggagaaagaaaaagcaggaatgatgtaatgaaaccatcattgttgataacccaacaataaaatgttccacctggcacagctgtcactttggggaaggcccagccacgagtagctctttgggtaccaccctctgcccacttgctgctgtgctacctcctccctgcatggccaagtctggtcccctgctcttcggccaggctcttccatccacctcttgacttcccgcatctggctttcctctacaacaatggcaagtatctttcagtttcttccttaccccttgcctctgttccctcatgccatggccatctgaaagttcctgatgggcattcacccatcaggaacctttttggtgtgtcaaatgggtagcaagtcacggtaaagtatcaagccacaaaagccaacattggctaacttgtgcagaagagattgctttggaaagaaagcaggggcactcacagaatggacaggaggggtggtgaaccagtctgggaaaatgaacaggaaccaaaggaagtcaagcaatgaaaataaagtggccagggtgccactgctggtggcccccacttccatccgagccctaggactctcagccatgctgcagtagcgactcacccagcgcaccccataactctgtgtcactccctccatacaaggccggctcagagtgttgaattgattggcccagctgtgtgtcctcaacatatttgtgggggcagaatgggaatgttgggcccctttaagcaccttccttctcctgccgtccaccaggcatcacaatgggaaaacctggccacttaggaagggagtagacacttgctggacagataaacaacagcaaatgttcactgaatgtgtttttatgaatgctcatctttccaatactagaggttgatttagaagcccaacactcagaaatgtttcctgtttgagcaaaataatgtgtacacacggacatacagtgtggaataatagacactggaagctcagagggcgggagggcgaaggggatgagggatgagaaattatttaatgggtacaatgtatagtattcaggatgatggttacactaaaagcacagactttaccactaagcaatatatcatgtaacaagactgcacttgtactccctacatttataaagaaagaaagacaggttttctgtttggtattttgtctgaaatttgggcaagcagagacttccttaggctcagtgggctaagaagccaagttagcccatgagcagggctaatggagaaattaatcctatgcgccacctcggcacccccaacagctaacccttcttacaaagtagaagctataacattttattaaagcaaaaaagattctagaattatgaattactgtcactagtggtagtcaattaaagcaatatttaaagaaataaagatacctgtgtactttttaaacgaatgcttgactcatcaccagttaaagctagtggttctcagaaaggcagagtcaaccagaacgtgtcagaaatgcaaattctcgggcccctccggaaacctgctgcatcttcagtcactctagggtggagcccagcagttgctttaacaagtcctccacgtgaatttgattcatgctgatgtcgagaactgctggtttaatcttaaccttggctacacgtgagaatcacctggggagcttttaaaatattcaatgctgaggccccaccctaaaccaattacatctgcctggtaagggaaggggcttgaaacaaaaagcttcctaggtggctcgaatgtgcagacagggttaagggactcagatataacctgtggttatacagaacatgtctgtaactcatgcgaacttctcaccaccctttgagagtaggttattgtctctactaccttgagattttggaaattgtcactttcctgttaaactattcatctcagtaaagaaaaactcaccccttcctggtagtctccatccagggacaacagtggctatcatcaatagcacagccctggggaacctcctttccagtgcagaattcatcttttcgttctctaaagaaggtttttcacggcccaccttgctaacatgctctctccaccacccacccaaatcggtgggcatcagaagacatcagtgttgcttaggtgaaaagcagctgttactgtttcaaacaagatttgggaaggggaaggaagggatagagagcgatttgacaaaggatacaaaattacaggtagataggaggagtaagttctagtgttctagagcagtggtcaccagcctttttggcaccagggacgggtttcatggaagataatttttccacggactggagtggggatggggatggttttgggatgattcaaggcattacatttaccattagattcttctaaggagcgcgcaaactggatccttcacatgcgcagttcacagtagggtttgtgctcctatgagaatctaacaccactgctgatctgacaggaggcagagttcaggcggtaatgctcgcttgtccaccacccatctcctgtgggcggcctggtcctaacaggccatggaccactgagacccctgttctacagcaccataggatgactacagttaacaataatatatagtttcaaatagctagaaggagaatattgaatgttcccaacacaaacataataaaattttgagatgatggatatgctaattaccctgatatgatcaccatacattatatgtatcaaaacatcactatgtaccccatgaatatgtccaattacttgtcaattaaaaagataaaataaattggctttttaaaaaataaatcaggattcttccccatctctcagttcaggtttacgtttgcctctcggcttcctgttcttctcttgcaaatgagctcttttcacctgctggggaatacggccatgaggatcacatcacattccagaagacccaaaagaaaagaggctgtctcacccaagcctcagtatggaaaatctcagaaaaggcttctgacagcttagctgggcctcttggatacagagctaggtcgaggtcactcagatcctagagccagggagtgaggtccgtgaccagcagtgatccagttttcatatgtgggtcaatacatatgttttcttttcttttccttttttttttgagacggagtctcactctgtcacccaggctggagtgcagtggcgtgatctcggctcactgcaagctccgcctcctgggttcacaccactctcctgcctcagcctcccgagtagctgggactacaggcgcccacaaccacgcctggctaattttttgtatttttagtagagacagggtttcaccgtgttagccagggtggtctcgatctcctgacctcgtgatctgcccacctcggcctcccaaagtgctgggattacaggcgtgagccaccttgcccggccgcattttcttttcttttttagggatggggtctcactatgttgcccaggctggagtgcagtggctattcacaagaacgaaaatacatatgttttctgatacagactcccctctttataagggtcgaatgaatcagagaatagctttaatatcaacacataaaagtaacattcaagaagtacattttaataggacaatgaatattttcatcaatcattatagcacattcaatccagagaaggcaaccagaatggagaggggctcagtttggagaattgttggaaaccagggtatttaacccagaacagaacaaaaggcagggcctgctgcttcttgttcctatgcagagagttactgggttatctcattccacacggcttcacaggcagaattattccctaactggcaagaggataaagtcctaactccttatcatggagtccaaactatatctactttccagagtcctttctaacctcgtctctgcattctgaaggatgccagcatcaatgaaaaacagcatcaggccagacacagtggctcacgcttataatcccaaacctttggggaactgaggcaggaacatcacttgagcctaggagtttaagaccagcctgggcaacacgagggcaacatacagacccagcctctacaaaaaaattttacagatcagctgggcatggtggcatagcacctgtggtcccaactactcaggaggccgaggtgggagagttacttgagcctgggaggttgaggcaaggatcgcaccactgcattccagcctgggtgacagagtgagaccatgtctcgaacaaaaaaacaaaaaaacaaagaggaaaaaaaagtaccagatactttttaaacggcacttgttaaaaatcaggggctggggtcacctttaagaacacggcctagtacagatggaagccaagctgaagacaatcaagtttcttggcacagtcttggcaaggcccttgtgccatgcacttcatagttcctttttttttaaagcaattcccctgcctcagcctcccgggtacctgcaattacaggcatgcaccaccacacctggctaactttttatatttttggtagagacagggtttcaccatgttggccaggctggtctcaaactcctgacctcaagtgatctgcccacctcggcctcccaaagtgctgggattataggtgtgagccactgtgcccggccaggaattcatagttcaaactaggcacaaccaaagaggggcaccaggggagaggaggagagggcccaggtttgtcatctttcctgagatgcccctaatatctaacgttgtgcttggtattcatatttgttgagtgggcaaatgaatgcatgcatgcgagagaccacagaacaccgtggcctctcattgcactcgtgggccttcctgccggaggctagattcaaacagtctgggcaaatgggcccaagtgttgacagtgggcctacacagtggttaaatgcagccagaagacattgtggcaagaacataagttagaaggtttcagtccttgctgcgccctacatgtgcaactgtggacaaattgatcatcctcactaagctcgtgtttttttcagctcgaaagtgagaataataataatgtttagcgatttgggctgaaggaggaataaatgagattccacataccggtacctagttagtcttccacatggtaagatgcttaagaaaacttacttcctctttacccaaatggttgtaataattttattctgttatgttccccaaatatgagttaatggccacatgttttggaaggcagagagaatgtctcagttgcacaatgtccattataactaaaaactcagtaaaggttctactttctgatgacgaggatttttgaggtttctctggtccttgtggttgccttagatatctgtctttcttaatctaaacacacagggcagagctttctccaagagagacccatgtgtccgctacatcaggatcacctgaatatcagaacgaagctgctttgcttgccattcagatggtcctcagagccactccagacccaccaagtcagagttcctgggagtggagcctggaaatctgaacttgaactaccaccctcaactgattcctgtgcacactaaatttggggttgaaaaatgttttcaactggagcaagagtgtgcttcctcaccaccagcctaaaagtgtacacagaccccacagccatgcacctcccctaaggccccagaatcaaaggtcacctataacgctccatttctgaacagtgggaagaatcaaataagagggcccatcctccaaacacagaactaccgaaaggctgttgtatctttttgaggccactcctatcacatatcacccctcaatcgatcctcttctcccttgggcctacctccccttaacttttgtagcctccatttccccacttgctgaaaggtgataaacaccaggttttgatctatggttaaccttcttgtccaaagtctcgaacaagcacattctgcatggttgttgaccactccacttgccaggtaacaggtgctcctgaaaagctagtctccttccctcctcataacactgcagtgagggtgggatggggtgatgctggtagattcttgccattcaattatggcatttgactaaggggactgttaaaaatgcaaaacctgctaggtgcagagtctcatgcctgtaatcctagtattatgggatctttagggtattgcttttctggccagaaacgtctgtggccggtggtgcctttgcctgagttcttgtcccgtgtccagaaagaaagaggtacacagatgagtggaaggtgagcaagatgaagaggagatttattgcgtgttacaacagctcagaggagacccgcagtgggtagctcctctctgtcagcagggtgtcccattgagtgttcggctctcagcagagaggaggccctggagagggtagctcctctctgcaactggttgtcctgatgtctgcagctctcagtagagagggtagctcctctctgcagctggtcatcccattgtctctctgtcctctggctcctctggctgagcccagggcttgtttgggcctcagaggggggaagtgtgtgtggattggtccatgggcagccatgggcaggcccaggagaaagcactgtaattccccttctgctctgtaggactggcagcctggcccccaggcttcaggcctgctctgtcctgaaggtagggcttcactggggacccacccctttccacccagaagtctgtctgcctccctcggccatccatggtgcccaggctattggcaccaaggggcacctgcaggccagcacccagccaccttcagccccccttcaacttcccccaccccacgctccttggtgcccaaagtttggagggggctgacgcagcagggggctggcatgtcagcaccaccccaagcctgtgtatacctggccgggctgtgacaacacccaggcttggccccaaaccctgctccaagatcagagcaggagcctggagtggggagagccgggcagtgggagcaggaacctccaagcctgcaagggcaaggggggccttcccaggctccccaagagtgcagggatgcctgggtctgcaaccctggtttgtgtgactgcagctgtgctcagggccatggggctcctgcctgctccatggagttcgaggcccagatccacagctatgacttgggcagctacagccctgcccagggaggtgggactcctgcctactcccggctcccaagagcacaggggtgcctgagttacagctgtggcttgggtggctgcagtttgcaccttgggagctcctgccccaccaacttggaaggggcagggatcccacttgtccccagctcccaccagctctgtggagcatggcactgggctgtgaccccttgcagcctgggctgggggctccaggtcctcactgggtctgggtcatcatccgggcaggagtgacattgctgcgaacgcccgctgtggccctgacgctcgggggcagccgggagctctccctcccccagcacacaacccggcctggccccatcgcagaggtcccagggtggcgggctgctgggcagggctgtttgcctcctccctgtgtcctccctgcagcggccagtgtgatggcagctagtagctgcaccagatggcctgctactgccatcactaagaatttgggaggccgaagagggcaaatcacttgagcccaggagttcaagaccagcctgggcaacatgatgaaaccccatctgtacaaaaatatacaaaaaattaggtgggcatggtggcacacagctgtagtcacagctacttgggagctcgcctgagcttaggaggttgaggctgcagtgagccgtgactgcaccactgcactccagcctgggtgatagagcaaggctcttgctaaaaacaaaaatgataaaacaacaattgcaaaacccaggctaccatagacgtactgattcagaatctgaatctaacaaggtgcccaggtgacctcttagtatgtgagagtctgagaaagcgtggcttgctgcccaactaacagctctttctgcccactccctcgctgacagcttgtaaaacaagtgctatttcaggaaggaataacccgcttaggtctttagggactctggaaggagttgtaaggtgagactataatcaaggaaagttctaagaattatgggcttcaaccacatagagacaggtttaacctcatcacggcgggtgccttggacagccttcctccactgcctcttaacacagttcgtacttttgaagacccagggatgctggagctcaccagcattacacccactcattttgatattagggttgtggtgagtcatcaaatcagccggaaccaattaagactgaaccgttaagatccctgctggcatcaccgcacatggtcctggaaacagagggactgatccagtgaaaccccacgtggggcagcagcccattgatgggacacaggatgtttccacaatgctccttaagtcagcagggtacccccattaacatatggccgcttccaatgcccagcctgcaggtggcggccattctatttccatttacaccgcagcagcgtcctaactgctgctttgctgaattagccctgcagggctcaaaggaagcgcttcgcagagctcccgttcagattaacgtgtaaaatttaattacggaggcctgggctatcgcaaggtttaaagccatttactaagcctgggagctacagagtcctccctgagactcctgtgtctagggaggcccaagcagccctttgatcattaagggctgagaatatctcagcttgcatattagggtcaggaaattatctttccactttccctactaaatggacaaagtattcatcttggggcgaaagagcaattctgaaactccaagagaaagcaaggacttccagaagccattggtccaggtccccatctctaagtggcttgatagctaaatccaataaccagataaaaataaaaagtacaagggaggcaaagtccctgtcccctaggaactcaaagatgaatagagcaatagtcacaagacacatagataagtaaatgcagtacagtgagtgagtcaatagaataagaagattcactcagcccttgggaatattccaggaaggcttcccagaggaggtggctcatcctcagggttttgaagaataaaaaggagttatttttacaaataaaggagtgagtggctgtggggaaggacatttcaggcagaagagttctgctagctctagaatttataggagcaaaacttcttcagtccagcgtacgtgtctggaagattctctgctgctcagctctatatggagttggacaactggtcggcatctgttccctaaaaactttagattgtcacctcctcaagggcatagctatgcctcctagattcccagcagtatcagaaggagacgctgagctcgtaagagaattttagtgcagtgctggagcccttaacacccaattcccaggcccccaccctgcatgaaccaactcttgtccaggtttcaaacttggacacacaattcccttaatgcacaattctcaggcccctcccctgcatgagccaacccttgcccaggtttcaaacttcaattccttttacctatagcgaagtatgatttttttctccatcactttataccaaatagaatgaagaaagtgaggcaggatgagtggatttacggcctcaaatgaatttcaagatgaataagaacagtcgcaattaaaatcaaatttctgagacaggatttgatctctttcaaggagagagcgggcctggccttgcccacagccacagatgccccttaatggggtttgagatgctaggatgtgggactcgggaggaaacacctggggaacgccgcacctttgaagctcattttgtcaaggttctttcacggcggtatcaccggagaccaaataccatttttaattactcacgaaagcacgagatggttgcctcttctcaggcacactcctcgctcttcacttcaatcctttttttttctttctttgagacggagtcactctgtcgtccaggctggagtgcagtcgcgccatcccggctcactgcaacctccgcctcccaggttcaagtgattctcctgcctcagcctcccaagtagctgggattataggcacgcgccaccacgcgctgctaattttgtatttttgatggagacggggtttcactatcttagccaggcttgtctcgaactcccgatctcaggtgatctgcctgcctcagcctcccaaagtgctgggattacaggtgtgagccactgcgcctggctcttcacttcagtcttatcttcaggctgtctctgtctccttggctgggggaaagacgccagtcagctattttttctgtggcccaggtgaggataaatgagggctccagggggtcagggatttgctcagagttggttagaaaaaagcttaatagctgctgatactgagcacctgccaggggcttgacacactttttctttcatctcgtgactcccgaggtaggtatggttagttttattttgtgggtgagaaaacaggctcagaaaggttatgaaactggctcagggtcacatagcgggtggctgaaatttaaatctgggtcttctgacccaaagcctggtggtttcccatctgccctcttgatgcaggagtccaaagaggaggccagggggcatgctcagaagctgcgaaggggagctagacctgcctccatcaaggagtccaggtgtctgggatccacctgtctacctccctcccaaccttatggaatattcctcagagtctccccctacccaaatttggtagggtttctcttcgttcagaagctctggccttcttcttcagctatttccttattttggtggtgtctgagtgaacccaggacaagacctgccaaggaattttctatgtcagtctgaaagaaaagctcacctcctccatcgcttgcagcaggggttccagctggagtctgcaaagccagggcgattctcccttccccataagggacatctggatatgtctggacacatttctgattgtcacatctgggagggtgggtgctgatgacgtctggtgggtaaatgccaggagtggtgttaaacatccggcaaggcccgggacagcccccgccacaaagaataattcagctcaaagtgtcaccactgctgtggttgagaaacctgctgtgaaaaatgccaggagggaggagaaaggagccccttaacttcagtgccttatgtccatgggacactgacacccccaggcagaagcagccacttcacttggcagggcggcacaaaatgaaaatgttgcaattcttgtgaaaaatgatttaaaatttcaagacagcaacagcagaccattaaacaagggcctgtgggactggccaggacacccacctaggaagctggaaagagctctctgctggtccctgggatcccctgggtgccctgtcctcagctctcaggcttgtagtcacacgactcctccaaagagttcaggccagaacactgagacggcagtgcctgctgagaatctgaagtggcagactcacctttcctttatggaggaaaaaatctcacttttgactgtcagggaatgaagggacaggactcagaggactgtctaggaggtcctgagtcctcccccgtcctactgcttcttgggagggtcaatatgccacgagggttttcaagcacaaagtaattaagaggaggagcagaaagcttccagtctccaagctggtagcccccagggctgaatctgtggttttctgtttgctgtgacacttcatctgtagagggccgctctgggaaagagcggtgcatactgggctccatctgaggaacagatcctggaaatgaccttctctccttgtctctccctgtctctcccacaccccctcaataagcagcctcctgccatttatttcaatgatattgcttttgttttgtttcatttttcttaagcattttatttttatttttatttttgagagggagtcttcctccgtcacccaggctggagtgcagtggcatgattttggctcactgcaactctgcctcccaggttcaagcgattctcctgcctcagcctctggagcagctgagattacaggcacacaccaccacacctggataatttttgtattttagtagagacccgtttttgtcatgttggccaggctggtctcgaactcctggctttaagtgatctgcccgcctcggcctcccaaagtgctgggattacaggcgtgagccactgtgcccagccttgagcattttacagttagattgttcttcagggttgagggtgtttttgcaaaccatctcacatgcctttgagaagatcggagggagggctgcaggggtgtgagtggtagcccaggtggacaggagcagccacgaggggcccaccgtgaatcagatcgtctgtggaacaggagagaagggccctgccacctgctcaggcagcccccacagcagatagttgtagatttccagagcttcagcttccctttcaagagtggaggggaaaaaaagcaagaggaaggcctgggggctagggcaacccacccaccagacaatgatcacagaccagccaccatcagccacaaattctgcagctcaggtctaatagtaatcactggtgctgtaaacatttaagcacctactgccttctggtacgcatatgggcatcagcatggtaagtagcgaagagcatggatggacccttgaaccagactccagcttgaattccaactgccacttaatggctgtataaccttaatctctctgtgacttagtttccttgtgtataaagtgtgggacctacctcatcggggtcactatccatagcttaatttttataaagtgcttaggaaagtatttgacacgtggtaagcactaatataaagaggtgtaaagaaaaatcatgcctataatcctagcactttgggaggctgaggtgggtggatcacttgaggtcaggagttcaaaatcagcctggccaacatgaagaaaccccgtctctactaaaaatagaaaaaaattagctgggcgtgatggtgcacacctgtaatccctgctactcaggaggctgaggcaggagaattgcttaaacccgggaggcagaggttgcagtgagctatcgcaccactgcactccagcctgggcaacagagcgagactctgactcaaaagaaagacaaaaattaaattaccagatttaatccccatggtaaccctaagaggtagggactgttatcgtccacattaatagacaggacacttggaacacagagaggctgagacccaggtccagagtcacacagctcgtctgaggcagagcctggattcaaatccaagcagtctggctttctgtaggactgtgtcctctctccaaggggaggatggagcttgaccacctgtgttcaggtcctggcttacccatcaattagcttgggctccaatatcctcctctgaagtcaaggaggttccccagatgtcgtggatgactcccatgagtggctcttagaggccaggaggcctgggtgtctagtcagtgtcctggcctcagtcctggcctctgggacaagggaattgtggataggggagcagctgtccctgagcagggtggatggatgtggcagtttccagcccagctcactgcacccgctgtcagccgttattgaaacacatagccagggctgggtaacaagacggccacagaaatgatctgaagtggatttaatcattgccctggtccctgccaactcttgtccacttaggggttttgcctgtctcgctcggacttgacagtctggacactcaaggtgatgagctgcccagagcacccaagacccagactccacccaggactgtcctctcctggaccacctgcctgaaacttccatcctgacccttctccaccttctcaatgggacctggggtgagagcccaagctgggagcgccggcctggcattgtgtagtttagacaagtccttgaagcagggcaggtgggggaatggggaggagtcgggggctcaggcccccatgttcctccccagcacagcctcacctgctctgcctcagagtgactcaggacaaaatccccaggtggctctgatggtacttgaagtgacagagggaaggaggaatctggaatggagaccccagccccaggcccttgagctcaacccagcaccagcccccagacctgttcactctttggccttccagggccagccccaggctgggctgtcactgatgtgggtgagcaggagtggtccccgttcctcacaggggcttctctctatgcacacctcacatcatcccccgacctccaggcataaaccagccttgcagccctgactccagacctgtccagagaaagtgccacctgcctggggagctgatgcagatgagagggaaggagagagagacagtgtcccctgcaccatgccctgaacttcccaagggaccttcatcaagctcccctgggggctgtattgttaaaatgcacagattcttggacctcgactctggacttccagaagcgaaatctctgcgggggtggaggaattgggcactgattctaatgaagtccccagggcaatctcacctgctttagagcagaggttggtaccctggctgcacatcagagtctcatgggaaatctaaacacatccgttccagggcctcacccccagaccaagcagaccagtgtcagggctggacatcaggcattcgtattttgtaaaaaatgattaaaatgtgcacccagggttgagaactgcttcagaatttgcagacctccagctgggtctgacccaggaaaacaggaaacaagagagatggtgtcagctggggcccttcactggtggggccaggtgggtggggggaacatccccacgatccaggcgacccccaccgctggccaggcaacctcatggctgaaggcgaggagggacgcaggcacgagggccttggcgtaaggaagctggctctgcagtcaggccctgccctggggctgttcagatgcccaggagggcaggtttatgcgaatgaagcaattacagaaccatttaaaagagtgagggaacttggtccagaaatgcctgtggagctttcaaaaggggtgagtgacctcatccagccaagaaagggtctgggagagaagctggaggccgaggtcttcagtctaggctaggggaggggagagaacgtttaagagggtggcaggcattcctgtcccaagtcaccaactgggtagcgctcttgtttgtcttatgcaagagtgtttagataagaacaggcttttgcatttcaaaaaggagcctgttcttcctcgccttgcttcttcctgtgctgagtaaacggaaggcacacccttgtttccctccctattcacagctcctctgtccgccacaaagacaacctcctccccttctgccctcgtcttctgcctgtggacattcaagggaccccgctcctccttcatcctttctctcctgcacgaatgaatcgtttcccgtgaatctgctctttgaaaaaccccttcctaacttccatctctcttcctctgctctctttgatgccatcgcttcttaaaagggaggcctagactcactgctgtctcacttttgtacgtttattttcatcatggtaaaatatacatagcataatatttaccatttgagcccttttaaggtgtacaattcagtggcatttacattcaaaacattgtgcaaccatcctgatgatctatttccagagcttttttttttttttttaaatcatcccaaacaaattctggaactgtgagataataatgtcccattcttttctcctcccagttcctggtaacctccattctttctgtctctatgaatttgcctattgtagaaacctcgtgtaagtgacatcattccatatggggcctttgtgtctggcttatttcacctaacatcatgttgcagcaaggttcatttcatttctttttatggctgaataatattccctcgtacagatggacagcaggtgttgacctattcatcggttgtctattcggcctccacaatccactgttttcatcccttcttgctgtctctacttctatgaccctggcctaagtcaccattttcttccaccagagtgctcagtggcctcctctgagatttcactcttttttttttcttttaaacagcgttattgaaatgtaattcatatattatgtaattctcccatttaaagtggacaattcaggctactctgcctatggagtggccatgcttttgtttctttacttctctaataagcttgctttcacttaaaaaaaaaaagtatacaattcaatggttgctagtatattccatgtagctgcaatcgtcaccgtggtccattttacagcatttgtatcacctcaaaaagaagctctgacccttcagctatctcccctccccaacgctcacccttacagccctaggcaactagtaatctactttctgtctctagagatttgcctcttctgggcattttgtctaaatggaatcatacaatccgtggtcttttgtgaatggcttccttcacttatcgtgatggttcccgggttcattcatgctgtcctatcggcacttcattcctttctatggccaaataactacctcattgtatggattcattggtggacatttatgtcgtttctatctttgggctattacaaataatgctgctttaaacattttgtacaggtttctgtatgaatatatgttttcgtttctcgtgggtctatacagaggagtggaactgtgggtcacacggtaactctgtgtaatcgtttgaggacctgcaggccacagtggctgtcctgcctcctctcttgcctctttcaaaactcctcttcacagagcagctgatgcgatctttcaaaaatgaacttcaaatcatgtttcatctttcttgtaaaatccttcaatgacttcccagcgttcttagaataaaacaaacatcatcaccatggtctacaagaccctgtggctgggcaccaactccttctgggaccatccctgcctgcctgtagggctcccgctcctttgggcgtcccggccgctgctccagcaggcctaggaactttctcgtgaagtcatctgcgctggctcctccctctgctggaacagtcttcgctcttgtttcagcctcctgtggacgctgtaaccaattgccatcaactgggtgccttcaaacaacagaaatggcttctctcatcattgtggaggcccagctctaaagtcaaggtcttgccaggggcctgttccctctgaaggctgtgggagagcatcctctttgcctcttccagctgcaggtggttaccaccaatcctccgggttccctggcttgtagctgcatcgctgcagcctctgccactgttgtcacgaggccatctccctctgcgtgtctgtgctttcactgtctttcctctgtgcatggctgtgtctcttctcccttcatatgaggacacaaatcatattgggttaagggcccatcttactctagtatgacctcacattaactacatctgcaatgatcctatttgcacataagatcatattctggcagggcatggtggcacacgctgcaatccctgcactttgggaggtcaaggtgggaggattgcttgaggccaggattcaagaccagcctgggcaacacactaagaccctgattctttaaaaaaaaaaaaaaaaaaaaaaaattctgaggttcctggagaaaatatgaatggtggtgggggcaggggagggcactattcaaccctgtatagcacagttcctcatgtcccagctcagatttcaactccttctcacccactatccccaccccagctcccctctcccagggcacctttctggtttctttttggcaccttcacaagctgtaagtaggtgttgttgttggttattcatccatttcccctactgggtgaaagctccctgaaggctgctccttgtctatcaagctcatcactctgccactgtgatccactgcctgatgcagggtgactcttcagcaacgtggaaggagacagggaagatcctggtcctgcaagaggaagcctggacacaaggtgtgcatgggccccgagcagtccaccaacacacgctgtggcgtgtatcagcacttccttcctttacatggacaaatgcgatcccatcatatggacacacacactccgtttatccattcaccagttgatggacattggcatcgtttccatcttttaaaaagaacatatagttgtacatatttatggggtatagtgtgatgtgtccacacatgtatagcttgtgtaaggatcaaatcagggtaattagcaaattcatcacctccaatatttgtcatgtctttgcggtgagcacattcgaagtcctctcttctaggtattttgaaatattccgtacattagtattaacaatagccactcttctgtgccagagaagaacagaatgttttcctcccatctaattgtatgttgttttcatcatggtgtccaccgtgaggccttggcctttggcgtaccagtcactgagtgctcagtgggtgactccagcccatctcaacaacgttggtgacagtgtcagctctcaagggcaggattcagtcatccaacccactttgcacctccaagcatcgatgacaggtgggtattcagaaaacgtgctgaaaacttcatggaagctacagctcgactcccaagagagaagcctgtctttgaagtgcctgtggaatgagaatgaccttcctctgtcaaacttcctttccagtatgatgttttagtcaatccagagatgtattccttcctgtgcattggggatggacttgcatctggggagggtgtctggggtcagatcatcccaggccactaggacctgaggtgttgaaaatcctggaggatcactgctgtacccagtgcattgacggccccactctcctggccgtctgccttctacagcctctgctgagatgaaggcaatttggctggatgtggtgaggaatctgtacagggaagagaggctgttgcagaggaggcagctgtaggagcgtcagcacccaggaacgcactctctggagcctggtgcagaaatagcacccactgcgtgtggtgagtgtctggtgtctggcattctgtgatgctcttcggttttaagacacctgccaggaacaaagtggggactggtaaaccaaggtgcaagattgcaaaagaggctctacttccccctgccttcctgtattctcatcctttgcaatatgactttgcatcttcccccatcaagagctggagtctatttccctcccatattagcttcctagggctgctgtagcaaattgccataaagcaggtggctgaaacaacagaataagtccaaagtcaagttgttggaagggccatgctctctctgaaggctctaggggagaatccactccagatctctctcctggtgtcaatccttggacttgcttggcttgtagctccatcactccaatctctgcctctgactttgtgtgtctttctcactgtgtctctctgtctctgtgtcttcctctcttcttacaaggatgccggtcattggatttggagcccactctaaatctaggatgtttgcacctggagatccctaattatttacatctgcaaagaccctatttccaaggaaagtcacattctgaggttccagatggacacgcattttttggggacactattcaaactactacaccaccccttgaatctgaactggccatttgtcttgctgtggtcaacagaagctggtagaagtgacaatgtgtccactctaaggccatgaagcctccactcttgaccgtggaacactaagaccacctgtgaacaagcctgaactagcccatggcccagctaggccaaccagcctccagcccacccagcagttgtgcagatgaatgcagctgagctcagtgaagctcagtagaacatctcagaccagctgagtccactgtaaattggcaaaccacagaattgagactgagtatatggttgttgtttgaggccacaccaagtttagggttatttgttacacagtagtcgatgactgattcacaaggtgttattggtttagggcaaatgggagatgagtgccatttctgggtgctgcccacgtataacaaaaaccaaagtcttggctgggcgcagtggctcacacctgtaatcccagcactttgggagtccgaggtgggaggatcacgaggtcaggaattcgagaccagcctggctaagatggtgaaacgctgtctctactaaaaatacaaaaattagctgggcatggttgcaggcacctgtagtaccagctgctcgggaggctgaggcagaagtttgaacctgggaagtgaaggttgcagtgagccgagatagtgcaattgcactccagcctgggtgacagggtgagactccatctcaaaaaaataaaaaaataaataaataaaataaaataaaaaactaaaggcttggatctaaaccatctactagtggcaggaagtctaggcatcttctgagccaccctcaggatcaaataaagctactggctgggtgtggtggttcacgtctgtaatcccagcactttgcgaggccgaggcggatggatcatgaggtcaggagttcaagaccagcctggccaagatggtgaaaccccgtctctactaaaaatacaagaaattagctgggcatggtggcaggcgcctgtaatcccagctacctgggaggctgagacaggagaatcacttgaacccagggggcagaggttgcagtgagccaagatggtgccactgcactcaagcctgggcgacagagtgagactctgtctctaaaaataataataataataataataataataataataataataataataataaagctactgaatcccttcaccaatggaggcacgctcatatacctcttggcatctctctacagtccccttaatgtgcagccatgcacacagtggtgcctattaaaggcatggaggtggtggtggagaacatgacagaagctaggttcgtagcccattagagtcatgaaaaaaaatgagtaattcccagcttcttccgctcactgcctctccatcttctggagcatgacaagaggcatattcctcctgtgactcgcagtcacgtggaagcagagaagctgccagtttgaaatcccagagatgggaccccccacctggccagggccaccgattaagagcccgagagccagccatcagcaggagcctcaaaaatgctggctgaaattaatcacttgccttgcaagggtatttattttctcctttatacctggagagaaatgggctgtgaactggaaatttccagagcagtaggctgaactttttgtgtgaatggcaacgactttcttttaaagtgccaccatttgctcagttcaatttcaccattaaaggacaatggccaattttctgtggacctgggatgtcggttttgtctaaagcgtgagcgtgtggggaatttactaacctggctgtgattgcccatgaaaacaggttatttaacaggatttaaatactgtgctctgaagctcaacagcagtgaggaggcagccggagaattggagtggcgcatttcccttccagcgctaatgagagaaggcaggaaaagcgagcgtgatagataagaggcgggcggagagagacaagacagaactagggccaaagagatgggtgagggaccccaatcaagagacaacgcctgcttttaaaaaggtgaccttaaaattcagtcacttgttcacaggttttattcaacaagtgtttgttaaagggtctgctgggctcaaggttctcaggtgccatgaaaaccaagcccgctaccaatttttgcaggattcttggaggaggtgttttggagccgatttttaacttaattttttgatgcttctgccagtcgttccctgccaaccttctgaactctccctgccttgctggcttgctaagtgaagccctgaacagaatatggggatgagtgtcaggaggttggtccttccataaactgactcgaatcttcgattacggtgtggcctcagttttctcatctgtcaaatgggagtcattatacctaactcacgtcttcaggcttaaacaagagcgtaggtaaagattctgacacaataccagctacttgtgagatggacacagccgccgtttcctttttcttccctcttgacatttgccaggctagaatacgtcctttctaaaattttgcttaggggtgtgtctcttccagaaagtcttccctctacctaggtgctattgaactttggcatggccctgcccttcgcagcacagggcggtgtctaagagtgagggctggggacgggctttgagattcacatcttggctcccgggctcacctgcagtgtgatagtgaatgagatgtttatctctttcaattctcagtttctcgttagaaacagtacgtgctctgtagggctgttagggttaaatgaggcagcccatataaaacgctttcctgggtcctggcacgtagtatgtgttcaataaatgacagctgttacccatcatcctcatgaaccatgaccctgatcaccggtggtttcctagaggactgcaagtctattctacaactgccattaataaagaaatctttcttcttatttgaaaaacaaaagcaaaacacccctgcccaaacccacctcagtgaaatgctgcctgcctcctctgcagagtcctgccccttccaagtagaaagaattttacttccaggcttaattcgcccaattactccatccgttacaacttactcctctcctctagtgtacccagagtctttgaagacagactgtactgggtgaggaaacagaaaatgctcaattttctatacaaacggcaggaaagaaacactttttttccactgggcttgagaatgaattatgtgacctctctacaccacaacctgtctcgcttattctgttttgcttactctaatttccaaacggcttttcatttcctgcgtaagcactgtctgagatagacggtgggggactggacagagaagggtgggagttaggggaggaggaagcagtagtggctgagcagtataattcccccacaacacattttccaaacctcaaatcaggacccggagccctggaagatttgcgtgcaagtggatttgagagaaggcaatctaggagacattgtttggttgctgaaaatattgacgtttctatggtttatgagaacaaaggaatagaattcttgaaatcagagctgttctgaaaagtccagggagtgtggtgaccgtggtgggtccagggaatctcatcttgaattttaagtttgctacaaaatgaaagatcagaagtgaatgacacgtcacagtggcagtctaggggcacctgtaagagctgagcttattgtatgatatcaggttttctgttatagtctctcactgccccaaacatcgactatttgtcattatttatcgattaacggtcattaattattggcatgctattttcctaatggtgctccccccgcctccccatcgctctatcctgagctcctgagtggggttgtgcctgactactgtgttcaacatcatgccgttaggagatgctcagtatacttgttgaataaaatggacacaagtgtattcctgaaacatgctctttaccttggtaggaagtgaccagaagagtcagcaccaagaaatcttgctgtccacttgggcccaccagcggctctccctgcatacctagccaccagactggaggaaaccagcagtagttgtggattggaccccacagtcagccccactcaggactccagaagatgttttgtctgtttgctgtttctggtgtgcggatgcttgtttagtgttctggccagccactgccccacccagactttaggcacctgtgtggccattgcctgggccacacgggagctggtgggggcagagccctcagtgtctgtcttcctcatgtcttttccttccctgtcggatacggtttggctgtgtccccacccaaatctcatcttgaattgtagctcccataatttccatgtgctgtgagaggaacccagtgggagatcattgaatcatgagagcagtttccctcatactgttctcgtggtggtgaataagtctcaagagagctgctggttttataaggggaaacccctttcacttggctctctcattctctcttgtctgccgccatgtaagatgtgcctttcactttctgccatgattgtgaggcctccccagccacatggaactgtaagtccattaaacctcttagtctttataaatttttctttataaacccagtcccaggtgtgtctttatcagcagcgtgaaaatggactaatacactctccctggatcacattaacaccttctccccctggggttctggcctcctctgggtcgtgtccaacatgatctgtcagtctctggtcaacagtgattttccaacgtgccccgtgttgggaagagatgaggggaggaaagtgtggatcttaaatatggagtgggaagagggaggagggagaacaaaatatatagagttacaaaggagagaaattatattatgacatggctatcaaactattcaaaagagcaaatctgtagtaatttgtgtgtggttttgtttttttgttttttgtttttttagacagggtcttgctccaggctagagtgcagtggtatgatcttgactcactgcagcctcaacctcctgggttcaagcgatcctcccaccttagtctctcgagtagctgggactacaggcacatgccaccatgcctggctaatttttgtatttttttatgtgtgtgtagagacaagattgttccatgttgcttgggctggtcttgaattcctgggctcaagtaatccttccgcctcagcctcccaaagtgctgggattacaggagtaaggcaccaaacttggccgatttgcattttaaaaactgaatatctgttcatttgtgtgctcctttattaacatgttaaatagcaagatttagcagcaggtctaacaggtctaatggctaccataatttcaaagtagtgatgagcagaaacaatattttgagatatctacgacaactaaaatgtaatatgaaaatatctgtgttttccattggtgcaaaagtctcggttgttgctaatatttctgtggtttgttgtccatcttcataacagaagtaaatgataacttttatttgaggccagtgagaataaggatgtattattctccacccaagtgtgcagaccccttgaattctgtcatggactctaaggtagagctcacattaggttggtgtatcttttgtgctttgtgcacagaggtgtccgctttcttactaaaataattcccaagtcacagagaacttccttagcctcaagaggctgtaggaagtatgtatggtaggagtgagggaatcaccattttcaccagggaaaaatgaatagttaacctgtttggttcaaaacagataccaattacttgaggctaaagtcacaggctgctggagagctggtctacttccaaacggtataaatatttaagtccagagccacaagcgaacggtgacagaggacctgtctgtctctgtgcctgtctccatcagctccctcactggctcccctgggacccttccctcctgtgagcccccatgtcccaaggggtgctagaggcttcagcactgctggaaggggacaaatttgtgttctcctgcattcttcttaaagccatgcccatgtcaaagcaacgtatagaggctcagtgaccaggaagactttattcttagtccagctttgtcaccttacacccaggtgaatctgggccctggaacatcaagaggcttgcccaggtcgcacagccagataatggtgggcgtgactctaaaccatgtcacagcatgccctccagagctctttccaatccaccttcgagaaactgggaagacccctgaaggtcatgggggttgggcagcctgtcccctgggctggctgtctctcctggccccctgctttccatcaccagggtagtttaattcatggccttttgaggcccccgttctgtctgctggggaacagctctactgccagcctccctcgggctgtaggccaccatggaggatagcaggagtctccacctccctccaaggtgacagctggaggcagcagcccacagacaagagtccgctcaatcccagccctcttcacttggctgccagcccagcttggctctgcatcccctgggagccagccctccagcccaccctggtaccgagaaagggtagatggactcaggtcacaggacatcagaggaggcaggcagtggacaacagctgctcgggaggaggcactgggcactcagggtcccgaggctggggtaggggtggaggtgtgggtgtggggacagtgccagggaagtttggcactacagtggagcaaaagaacagaaggggaagaggagttccatgcagttgggcatgtcacataattacaggagaaaaatcaggccagagcctggctctctctacctctgtctgagtgatcatcacccttattataaagcaactaattattagtctggctcattagcaattataaatctctaactccagaacttcatttaaaaaatgaaaagttagcacttaatgattttcctaactgcttagatcatgcgcagagcttacacatgcagctcccgtggttcctgggagcggggctggccttcaggtactggggaggggtccctgctttcccatccagaaacctggatgtccccccagtggccggaaatcaagcgctctgagatgtgagaagtggagaaagagcggtgaacttccttctccttctgttttccagtaaaaatagaaacaatgtgtttattgagcctttctgcgtgccacgtgcttggtgttgtgatgccttatttcatttaaatctccccataacctgatactgttcatctccattctattgatgtagcacttgcagtcatggcacctgccataggatcatgagctggatgacacccaggttgccctgacttaaccactacccttaactaagcccctacccttaaccactaccccatgctcaaccacagctctccatggctctaatgagggaagagccttgggtagattgatggttgtaccctttgcaaatgctccctaagattggactgctagagaaaggtggcctgttagatcctggtgtgtcttgtgggtccatggtgtgtgggcaggtgagtggatggagggaagattccttcccagttactaggatggacacttttcattatcctgtggctctttaaggcttttctagcctcctcatcctgccccaaacttttccaattctttgctacttcttccgtttcttgagcactcactgaaggttggaacaaagctgaagaggttgcatgaggaaggccctgttccctcaggcagcccttcccttttctctttctttcttccaggtggaggggaatggctggagccaggaagagctgcctgagagccacaggcaaaggtgggaggcgaaaggaagacagagcatggatgctcaggcccagaagttggaggaaacacccacctgggcacgtgagacccccatcaaagcagcctagcaagacaagatgatcccagaacaagggagggcccttgggttcaccctaactgtgtgcatttgacagtggcagtgtcttcccacctgtgaaagtaaggggtaggggttagacagttcttccagctccggtgttggtttctgtaaagaaccttctggtcccgaggctggggtgggggtggaggtgtgggtgtggggacagcaattcaaacagacagtccccatccctacagtctgagattcacaaccttagttggaagctgtaactataaaatacccaaatcacaaaacttaaagaaatgaatgacttatatgactttgtgtatttctacagagaaaagggaagatagccattagatagaagagtggacattagtgactcatgcattttgtcaggggttcaaattccgggtctccaagtgacaaggtctaaaaaaatctcagagtggaacagattggagtacatatcatcagatgtcttgaagatgtggcatggatagagcctgttcctctcatcctacaaacccaggaaggcttcctggaggaagtgacctccacatcagagccaggtcagcaggcagggcagctagatagggcaggtgcccaaatgccagctcacacagctcagtagaaatcactggaatactgctagagatcctggtgagggtgaaaggaatcttctgatgagcagcttgggggatgcaaaagtcctgcaagtaactgcactatcctccttgctctccaaggagagcaagaatctgagcatctcagagcagaccaggcccttccagcccagtgtggggtagagagcccagcccccttgctctccaaggaggatggtacagttacttgagggacttttgtatccccaaggggcagaaagtctggggtcaaggacaaatgaccaaaagcttagggctgacacacatggggcacttcttaaatgctccacgtgcattcaagtcacttaactcaaatattatcctcattgaacagatgcggaaacggaggcatggagcaatgattacatagcctgggaatggaggaggcaggatttaaactagatggtctggctgcagggctgtgtgaccttcacatactcatactcatactgtcctactcatactgtcagtatgacctactcatactgtctctggatgaagaagttgtgctcaccctgagggaagggcaaaggagggggctctcctggcagaatattggtttcctactgtgccccacactaacctatagcccagtggccacattcctcccatgagatgctcctgggacagcaagaggtccctggaggagaagtgagcccctggtgggtcccgaccatgtggtacctgtctttgaatccccacctcccaacagtgcccagcatggcctggtggcactgatgccatggagcacagcatcctctactgaccagaatgggaacatgccccagggagaaacccaaaccagaaggaagcccaagctaattaggcctccagagtcatatgattttagagagaggctccaaggaatttctggggccttgagaacaaggagggagcaggaaaagagataaagacaagatgactccactgatcctcaaagacacatcctaagttcaggataaacaggcagggagggtatcccagggtcaagtcccccagcccaggggtgcccagactgtcttggtggagtagaaactttgtatgtttcagagcccgaggacagctggagtggctgattgtgatgctcctgagtggcggggagtgggtagctggtgttgatagttgagccctagagcttggggcacacgattaagggttgagatgggttaacggggcaccaatgggggaacactaagaagaaattctgactcagtccgggtcagccctgtggtccaaagcaaatggatcacctctccacctagtgagctccctgtctactgaggtattcaagagaggctgggcgacccctggcaggaatcaagcactaggtggaggtaaggctaaaatgtaattaccatcagcctgataaggtgggtctccttcttaacccatttttccctaagaatctgcaggcacagagaggttaagaaactgcttgagatcacatagggccaggattcccttcaggctgcccccaacttcagagctcttgtgtttagggccacccttgcttcacctctgtatggcaacctcacactgggctggaaggacctggtctgccctgagatgctcagattctgttagaaaagcccctctgcccggggaccccagaacctttttgctccctgcacgaccccccaagccttcaccccaagcctctgtctggattggccttgctaggatagaggcctagatggcgttctcttgctgagggctggtcagaggccagcagtgctctgtcctcccccgctcccctctggctgcccatggtgtggccctcacagccctgggtgcccctcccagccaactgattttctatgaaagctgtggcaagtgacggcttcttgcctgggaacagcacctctcggcaaactgacaggtaattggcccctaaatcccccaggagacacggggaggatgaggaaaaattacggctgtggaactgagtcttaaaaattatatcacctttgctgacagtgtaattactcctttttctcaagatttagtgcagatctccaatccttaaacagttgagggatattttaagggttctccttttctgttcttcttttccccttggcctgcagaggctagattcctggcattggccagtttccctgcttcttctaggaagcaaaatgtccctgggctggccgtgcagagatcacgcaaggtgggaaggggagatggagcatgagaaagggggcttgacccaggagtcactgtgtttgggccacccagggcagccacacagtcctgtatgaacccctggccacctgtttgaatgtcaggcaaggtcccttggcttccagaagctctccctagccaacgcagtcagtgcccacccatagccccttagtctactgcagaggccatctgtaggcgggtcccatccttgacctgaaggtgatcttagtcatggagcaggctgccaacccctgtgggttcatcttcatcctccaggagcaacccccagccaaagtggtagagtccgtgggaaggaccccagtcctgagacatgttccccacagtctcacagaggctcccctgtgggccacgggcctcagggctggattctgagctgggactggtacttgtacccaaacggccctgaatccctcattgaatctcactggagcttcaggaagttgaggaggttgccagcccctcctatcctaggtctctaatgcagaggggccctcaccttggggggcaggatgggccagaggcccacagcagtgacccactcatttacacaccttctactggctttcccaccttccctgccgcagtctccccactcccctcatgcccccaaataagctacctgcacccaaatccttgtctcagcatctgcttttggggaaacccaaacttgaggccccctcccctgaagcttggcactagtgctgtgtgggcaccaacttctggttgggagcaggtgttttctgaaggcaaaggaatggtttgcatggtccagggggctcttgtcctgttggctgcaacatactctagagacagtgccccttctctcaaaattgaggaaagcggtttagggacctgaactccagaaaccacaatgtctttctccctaggaggctgtcaccctcccaaagaaagcctttgggtccacagatgaaggtctttctgcattagatacctaggaggggagggactggtggtctccttaactttttgaagttcttgatcagagctaatgtgggattcagggtgctgtggctagaagcaccagtcttacttcagaatccagtgagctcaggaatcagaactctgggattttgtctttgaatgactgtcgggatagcgtcctaacaggtggaggcagagggtgggtacagagaatcgcaggcctgtgctgacaaggaatcggatttctgctgctgtcaaaaaggccttaaaatggtcaccaagcccacagccaaggaccagtttaggagatgagacaatacgctcgggccaagggactcaagctagctcaagatggcatctttggccactccgaagtgccaggctttgcactagactcatgccagactcatgaatgtctttgttgttcacggagatgcctcggtcagggcaaaggcaggatctgggcaggaatttaagtttcccaaaggtagccgccagacagaatctgcctgtccttggatcttctcatcttggaatctccaacaagacccctgtgagacctggagctggcagcagggctagcttcctagtcccagctctcctgacaagtccacaccatctcatggccacttcattcccacctaactatgcactttcaacattacagctgtaacccaatcctgcagcatcctatctcctggaggggaatgaaggtaactcacacttattaagtatctactgtttgcccagcacctagtattttacatatatgagctcactcaaccctcaaagcaattctatgaggagggtgttattattatccccgctttgaaaatgagaaaatggaggcacagactgtttcactgacttgtccagcatcacacagcttctccattgcagaggcaggatttgaactcagggggtctggattcacagtgggctcctaaccactattataaatgtccttgaagttgatagagaacaaagctccggaagaggatcttggaaaggggatctctccccacttctgcttggttctctctgcttagatcttggtgtttttggccaggtgcggtggctcacgcctgtaatcccagcactttgggaggccgagttgggtggatcacttgaggtcaggagttcgagaccagcctggccaacatggtaaaatcccatctctactgaaaatacaaaaattagtgagtgtggtggcaggcacctgtacttccagctgctagggaggccgaggcacaagaattgcttgaacccgggaggtagaggttgcagtgagccaagatcgtgccactgcactccagcctgggtgacggagtgagactgtctcaaaaacaaacaaacaaacaaacaaaaaagatcttggtgtttttcactgggtgggtatgatggttaattctatggtcaatttgactgccctacaaggtgcccagacgtttgtcaagcattattctggctgcctttgtgagggtgtttctggatgagattcccatttgaatttgtagacagagtaaagccgatagatggactccctgatgtgggtcggcctcgtccaatcagttaaaggcctgaatagaacaagaaggctgagtagagtgaattcctcctgcctgactgcttgggctcagaaatggatctgttccagcctagactcagcctaggtcctaagccggctggctttctgattagaacttgcaccactggctctcctggctctcaggcctttggtctcagactgtcactatgctattggctctcctgggtctccagtctgtagcttgctgactctagatcttgggaattctcaggctccataaccatgagagccagctcttcatgataaatttttacacacacacacacacacacatacacacacacacacacacatacacacacacgcatataaaattttacatgatgtaaaaatctcctgttggttctgtttctctggaggaccctgactcagtgaggctgtggacttccttcatgggcaccaaagttctccatttccttgggggcactgctgttgttccagccaatagtggggatgctgctggtggagacccgccttgaagagatgtagcaggaaagagcagtggaaggtccactgggtgtcatttagcaatcggcacaggcatgaacccatcggaactggctctggacataaatggcaggtgagaactgccttgcgtatgtcccaactccagtgacaatactagagcacaaagaagatggctattttgggccatccagaatccacctcccctctgtatgtttggaaaaagtccccgatatagaatctaagcatgccagtgacgcactctgccagcctgcattgcttgtgaccaggcttgacaaccggatgtgcccttcctggaccttttgtctggagctggccacacagatgcaggatacacagatgcaagatagacagatgcaggacgaatggagaacctgtggtcgtggttactaacagcctctatccagttcccaggggacagtggcctcgtagtggctgcagtggcatcctgtatccaggacccacaaaatggggcccctggtgctccatggaggtggtggagggtcctcaccagaccatgcctaggctgtgactttggctgtggtcctgtatacattgtcacaaagccaagctgatatggttaggctttgtgtccatactcaaatctcatcttgaattataattcccataatccccatgtgttaagggagagaccaggtataggtgattggatcatggggccagtttccgccatgctgttctcatgatagtgagttctcacgagatgtgctggttttacaagtgtttggtagttccgcctgtgttcattttccctcctgccgccttctgaaaaaggtgccatgcttccccttcaacttccgccatgactgtaaattttctgcgtctttcccagccatgctgaactgtgagtcaattaaatatttttcctttataaatctcaggtaagtctttttttttttttttttggacagagtcttgctctgttgcccaggctggcgtgcagtggcatgatcttggctcactgcaacctccgcctcccaggttcaaacaattctcctgcttcagcttcccgagtagctgggactacaggcacacaccaccgggcccggctaatttttgtatttttagtagagatggagatttcactatgttggccaggctggtctcaaactcctgacctcaagtgatccagcccacctcagcctcccaaagtgctgggattacaggtgtaagccacctcatccagcctcaggtatgtctttatggcagtgtgaaaacagactaagacacaagccctcccagaaattctgcaacctcctgataccctttcagcaaatttctctgctgcttcaattagccagaatcagtttctattgcttggatctagaaccctaattgcagcagccaactctgggctaggaactccacagtctactcacatcatctcctttagccctacccaggccttgaggaaggtggctttatctcagcaaaactgaggctcagagaggttgagtaatttttccccagatcacagagcttttggtggagctaggattcaaacccaagtcttactgacctcaaagacatggaatcctcagccactaagatccccaactccttttctgcccccactgctttaattataccaataagcaagggaaaagcagaaacaagcccaccacgcagggaccagcctgggagccaaattgcttctgagctgaatgtttctctcccagtcttcagtgaggtggtggcagctctttaactccagctgcggcgagaacacagtgctcatatatattcacaagcgggagatgaaaagctgcacaatgcccggccattaatcctaactcaggccttccaagcggcgtgtgatgatctgcctgaagcagcgccacattcgtgctcgggagctgggaatgcaccccaaatccaccgccaggggcacacagtccaggctcccccaccacactttaccgtccaccctcatgccctaatggcctcatcaatgtttcgtggccgcctcagtgctcctgacagataaattaatgagttggccctgagctataggaagcacaccccaagagaagacagaacttaaggaatttaagccccactgcgcctcttgtgcccaaggtgggagagttgaaagctggtttcctggcgagggtgagtggagatggtcatttttctggcattgattcgtgggttttcatttcccaggagcagcctggagcaaaggagaacgtgcaagatgaatctggaaggcctcccccaacacggcatgaagaggacccgagccagccagtctgtggatgggcaggagacacagggagccctgctcaggagcccgtgtgagcacagaaggggcagccaggctccaggtttgttagttgtccagacacctggagcctatgggaggcacagaagctgggaagctggaggtccgtgtctggctacacacggctgggactaaaggattgaggttagtgcttccaaacgcacttggtgttctaggcatgggcttccagacctggacctggctccctggcaaggcctcccctctgtccttctctccacccacctctgtcccctccctgctcagtgctcgacacccaccatgtcacccagccccttacttacttctgacctctgaccctcctcactgccattgactgcagctcattattgtccttccatcaggtgcctcctctctggacatgggaggccacacagttctgctctcgggactcagatgccacccagcaccccctgagcatgtcctgcagcctggcctccttcgctgcttcctggcagccaaccaatgcagagcgagctttggaacctggcctgggcatacatttggtctctactaccctgcagtggtgagccctgggcaggtcatttaaactctgagcctctgcttcgtgtgcagtgtagtgcagtgggtgggacccaccttgcagagttgtgatgaggttgaatgaaactgcattcaagggagagattatttccctccccactccatgtataactacaactgattcctaaagagtggactcattccctggaggcctctgtgttctgagtactttgatgagtctggagacacagaaatgtgcctggggttagtgtgagtgcctgagaacactgaatgaacttctttgcacaaaagaaggaaaatgaacaacagaggaaaattcacagctctgaggtcggaggggggaagggaacatgaagagatgggaggatgactaagaaaagaaggccgggcgcggtggctcacgcctgtaatcccagcactttgggaggccgaggcgggcggatcatgaggtcaggagatcgagaccatcctggctaacacggtgaaaccccatctctactaaaaatacaaaaagttagccgagcgtggtggtgggcacctgtagtcccagctactcgggaggctgaggcaggagaatggtgtgacccgggaggcagagcttgcagtgagccaagattgcgccactgcactccggcctgggcaacaaagtaaggctctatctcaaaacaaaaacaaaacaaaaaaaaaaaggtggggggccagcaagatgaggaagatggcggagaccatcctggggacaagtgaccattggaagtcgacactgttgtgccaccaaagaactcgatgtctaggaagttcacagagctgtgtgcagtttctctatccctctccaaaccccaaagctggaagaggagcaggagtgagtcttccctttttttgttgaaaaccaagaaaggacttgattgtctcaaggcccaagacagagacagcccacatgggatggggggtggatattcagtccagaaatgaaatcaaatccacagaagcagggttctggagctggaggggggcatgaggacatggcttgacctcctggggtatgaaaggggcataggaccctttctctagatttcaagggacagggaggctccatctgacatctggttatgtctaatccacctggcctctggtgggcttccagatgtggattcattcccacttccatcctgaaagtcagtgcaagggtcacaggcataggctggaatgcccttctagagagtcccactctacccttgaagcaggccaggaagggaaagggtggaggactgaccgtcaaggccacatcctcagaggaccagctgcctggggttcatgactcctcagtccccttccagccccccaggccagagccacatgcgagcaggcagcacaggactcagaggaaaacctgttaccgctcctactaacaggggatgacaatgccaacagcacagccacttccaaaataggaactgataaatcattaaacttgtcagattactcaagaaaggctgggccctggtcagcagggaggcaggctgccctgggcacctggtttaacctctccagtcagagggagaccagtggaaaggctgcagagacccccaccccaatccaccctctccaggacttgtgtgccacgtggctcatgaggccgcctcctccctttctttcctctgaggcttttctgcaaactcgtggactctggagtcagatgctcagatccaaatcccactgtatactctctgggttaccttgagcaggttgtttaacctctttatgcctcagttttctgaacggtaaaatgggaataataacaccatggactgcaaagtgtctggaataatgcccaggcatagacagccctgaaagcactgggggtcatgatttatccctactgaccccttgaggctgcccctgccacaaacaaggccaggctgctgctctcaggattgggagataatatttcattaatctttgtgccacctctgacttgctgacatgggcagggatgtcagcttcctcttcctgtatcttagcaacatcatgaccacagggaggaggtgggcataaagggcttccagttctttagcggaaaaaaaaggagaatcggtcagctttctgtgatacacctccagaaaggagtcattgcagtggaaaattcaggaggaagaaggaggggaacccagtgtctcatctcagcctctgagcaggccaaggacacttcattccaccctgcacatgagtgtatttttgtctgcctttcacagtctttgaggaacttcctcctgaatctatcagtgttctggttgcaagcaatggaaactgatgctgaaggaatgttttggaaggatatgggggcacacactgttgatgggaggaaagaaagaaggcttggaaagtagggagcaagagggttctggaagctggaaagcagaatctgtctgacacttctgcctccatggtctccacacacagccgctatgtcaagaggctactacaagcaaattctaactgtttctatgtcttttcactactcagccaaagtcaaagccagaatgtatgattggctaagcttgctcacctgactggactctggctgtcaggattggccacaatgggtcacctgacaggactctacctgtcaggattgaccataatgggtcacttgactgggtattggttgttgggactggccaaaccagttacctgactggactgtcaggactggcccgcagtgggtcacctgacattattggctgttgggattagccaaaccggttacctgactggactcagtcaggattggccacaacaggtcacctgacattattggttgttgggattggccaaaccagttacctgactggactctagctgtcaggattgaccataatgggtcacctgactggaccctggctgttgggattggccaatcctgtcacctcactcaactgtggctgtcaggattggtcacattggtcacattggtcacctgactgggtcctggctgttgggattggtcaagacaggtcacctgactgacccaggctatcagagtaatgagaagaaggtctctcccttgggctgagcagaaggttctggggaactgtgccttgccacactgcctacaatgggggcaaccccagatgtacaagtctgctgctgtccttgaagttttttcccttgcctcctccccagtttgcctgttggtcccactagggcagtgccatattggcaacttcccatgtcctccacttacagcagacaaattggaaacctcccttgtgggaggaaggatgggaggatgggctccattacaaagcaatattctgaaggagaagagagccatttggacgggaagatggagctggtaaatctggcttgtctccctgcatcgggggcaagatggattttattcataaatattctcagtgatcttgagcttcaagcagcctgcaaatagcttctaatgagaaccccttgaccttccctctacccaccaccaccatcgccctgcccagaccctgcccctttcttctctatcacttcatttgttacccaagtctcccatctttctacctctcattcagagtcacactgggggccctttccctgcagcctggatgacatccatgtgtcctcagcatcgcaccttcctggcccagccttgggcccctaacttgtttcccacaatctaaagctgagtctccccactgccacccagacctatcacagtctttctgtcctcattgactgatgagaataattggtacccatcctccaaggaccctctctgtgtggatctgtagacgacagatttcaaattgatttaaagcctgtgtcatgctggcttaaagaaaaatccctacagaaattagccagtttaacatttgggagatgcttagcaaaacctgcactgggtaattacaaaggaggcgccatttcccctcaaggatggagggaatgcagaggagggtagagcagtgtccctactccaaactgcccaaggacaccagggcattgctgccactgctctctgagtccatctcttctgagacgggatgaaactggcttaactgatgatttgctcatttgttcgctcacaccttcatccatcaagccagatgagtgccaagcgtgcatttcagtctagcccctcatcatctgttgcctgaatcactttaccagttgcctaaatgatcttcctgtgtccagtctcttcctcatccagcctgccccctgtggggccacaagggcaatcttcccccaacatgaagctaaataagtcactctcccaaagaaaccctgtaatgtccttcccattacctacaagctacaggtagtcactctgaagtaaggcacgaaaagctggtctcttcctggctgctgctgaggtctctggcccatctccccaactgcccagcacttcgatgccataactttgccacactgatgtttcgcaggccagcgcatgctgttcccgctccctggaactgctggcaagttgactttcctcccagcaccctgccaggcatccccacttccacagggcctccttcaggagggatcatccccatctcctgggtatgatttctgtaccttctgatacctttggtcctcacatatgtggtcactgttaacttacgtggtgatatggtttggctgtgtccccacccaaatctcatcttgaattgcaactcccataattcccatgtgttgtgggagggacccagtggagatcactgaatcatgggggcggtttcccctatactgttctcatggtagtaaataagtctcacaagatctgattgttttataacggttttcccctttttcttggctctcattctctcttgcctgccgccatgtgagacatgcctttcaccttctgccatgattgtgaggccttcccagccacatggaactgtgagtccattaaacctctctttctttataaatgacccagtctcaggtaagtctttatcaacagcatgaaaactaacacatggaaaacccttgacatatctgacggcaaatagaggcaaggcccagccccagcgcagtgcctagctcaaggccaataaccatgttgaaccccaagcagcacacttgggactgagaagctgaatagacacagccctgccctcagggagctcaccttctaatgggacactggcccttttgctgtgttgccttccaattaaccaagtggccatggtgagtgacatttttgtcagctgttgaccaacatttacctattcagtactagccaggtacagcgtctcatgcctgtgatcccaacactttgagaagccaagacaggaggatcattggaggccaggagtttgagaccaacttgggcaacatagtgagaccaggcatggtggtgcctgcctgtaatcctagctgcttgggaggctgagacaggaggatcacttgagcccaggaatttgatgctgcaagtgagctatgattgcaccactgcactccggcctgggcagcagaacaagaccctgtctctagaaaaaataaatatttatttactcagtacttattttgggtggggactttttaaggcattttagacccatcactttatttaatccagtggctctcagtgtcacctgggaagttgttagaaatgcacagttggtttttttttttgagacggagtttcgctcttgttgcctaggctggagtgcagtggcacgatcttgggtcaccgcaacctctgcctcccatgttccagcgattctcctgccttagcctcccgagttgctggggttacaggcatgcaccaccatgcctggctaattttgtatttttagtagagacggggtttctccatgttgttcaggctggtctcacctcaggtgatccgccctccttggcctctcaaagtgctgagactataggcgtgagtcgccccaaccagcctagaaatgcacagtcttaaggctctccccagagccactaaattagagaccagggggtgggcccagccagctgcattcaacaaggtgatactgatactcattcaagcataaaactaccctaggggaattgccccaatgtacaggggaggacactgaggttcagccaggttaagtaacccacccaggatcccacagtgaggccacgtcttggtcggagagtgtggtaggctgaaaaatagctccctctgcaaaagatagccacgtcaaatccctgggacttgtgaaagtgacttcgtttggaaaaagggtctttgtagacataaggaaggatcttgagatgggattatcccggattatctgagcggaccctgaatgccagcacgagtgtctttataagaaggcagaaggcgttcaacacccagagaagagaaggaggcactgtgactgcaggggcagatatgggagtggtgctgccacaagccaagggttactggtaggccccataagctggaaggggcagaggaagagtcttccctagagcctctggaaggcacgtggtcctgccaacacttggatttcgacttctggcctccagaactgtgagaaaatgaatttctgtggtttggagcctcccagtttctggtaatttgttacagcagcccccggaaactaatatagagagccacaaaaggctggtgctgctcttggaaatgtgatcagattcccatgccaagaggacaagatgcttggcgatagtcccgtgggaccagcctctctctctggcatcttttcagcctcgtgggagagagtcttcctgtttctgcgagagaggcagtcccctgaggacagggagtgggtcctgcttctcactttatccccaggcttgttaagtggttcatcgaatgaagattttcatctcgaggttcaaaccgcaagaggcggctgggatattggagctggctccttcgcagagctaaggttctcaggcaggaagttaatctccgtagaagttttctgaggccagagaagatggtgagtcattccctttgagagatttcttatacatgttcatctctgaagtagccaaatgaacagaagcatagacacgcttcttacactgtaatgtgcgtatgaagcaccaggggatcttgttaaaaggcagattctgattcttctgattcagcggaactaggcagggcctgagagcctgcatttctaacaggtcccccccgggcatgaccgggctgctggcccatggcctatcctcagagtcacaaggcactgactctggagacaattctaaaatcacctgctgcaacaccctcatgctaaagagaaggaaactgaggccaagaggagggaggtggctcccccaaggtcacagagccggaaatcaatatttgatgctaatctaagtggccgccctggcttgtagaggccggaaggggaatggaggatgttccctttggggcatgaggttcccctgacgaccctacctctgacaaccctacccggccagctctgttgctcaccctcctctacattttgaaacaaacgtcagctgccaggctgatcgataagcctgctcatctgtgaggcttgaggctctctccacagatgtaatcagggctccggagacgtcctggcagcgggcatgtggggagggagggcagcgatacatttaatcaaggaacagatggggagctgatagagtgtgtagaaaaatcaggtttctgtgataacattctcttcccccactcagcctccgcatcccttgacttctccaacaagaactcccagtgccaactccagccctgccctttccaaaggtgtttttcccaggaacctccgggcccttgaagatgcaggggtgggagtggggtgggggttgctgcctgcggagccctcctcccaccaaagcttcctctatttgctcctttctccgaccaaagcgggaggaggccaggaagccagggagctgatggccaagcactaaatagtccacccagaaggcttccgagatgctggcagccacagactcctggaagcttgcagggaggaaatggagatcatccgcctcttgaaccccttgcccactgccaagttcacaggtcttcagccctcatcgcctccacaggtgtctgagtccaaggagtggaagtatcgggattctatagcagtggttctccctgggggcgacttgacgcctaggggatgtttagcaatatctggagatctttcctgatggtcacgactggggttgggagatgctgctggtatttagtgagcagagcctgggatgttggtaaacaacctgtagtgcatgggacagccccacaacatgatttatccctccccaaatgtcagcaaagcccagcttgagaaaccccgctctatggaaagaaagccagatagtggcaggggctttactgagaccaggctaacctgttcctgggtggagtcatctggctttttccccatctatattcgatcctcaaactagcacattcacgacctacgcaggttctccatacataccccacccccccccaaatgatgtggcctcagaggggtcctgatagagttgagggttggctggggcaggagatttcctgctggggtctcacgtgctcacagcaatagtgccattcacccttcaggttcctgtgaagacaggctacaccgggtgtggaatttagtgggtaggtagtaaacaaacaaatgcatgaagtactcctcccctcccacccctgcaggtcccatctcttatttaatcccaggaaattcactgtataagcaggggtgtggggagggtggctggggcatcccaggcacctggcctagccctccctcctccctcagggccccctcgctgcccagtggcttcaatccggaccaggcttctttaggtgacaggtctgagaggtgtgaggctgtgtttgtgtcatctcccgccctgatgccaggctctgtccctcctgggcacactatgaggaggcctcatagtggagctaccctgagagcaggctccctgcctttggagtcaccactcagagcttggggtgacctgtggaggcagcagcctggagaacaggcgtttcccctcttgccctgatcttccgagttaagctttggcctggctgtgatgtattattagtaataatgcaagcccccttatttattactttttagcagagcccagagctcaacgtattgaactcacatcaccaaatcttctcggccatcgcatgacgatgtttaattcccatttgactaatggagaaaccgagttttagagaggttaagtaacttctgcaaggtcacagagctggtaaataagcaggacacccaggattcccaccctcgactgactccaaaggccatccttttagtagcaggggccccactgtccccctggtcgcccccctgagcggtccacacgccccaccaccagcattacctggaagcttgttagagtcacagaatcccagctccaccctagaatatgaaattggcatccgcactttcatataaagaccctggggactcagggtgcattacagtgacaattctccaggacaagtgctacgttcccggagggtggggggtgttggggtgaatggagggggatgagcatgtagaggctctaaggaacccagggaactgggggcaggtgcagagttcgtctgggccagtttggtccagcttaccagatgtttcacttgctgacctccagggccggatgacacctgtgtctagccacatcccggccttcactctggatattcgagaatgttgactccccacttgagaagttcccctacttccaactccctggaccccctcccctcctgctcgtggaggcagctggctgggtctgatctctaggcatttgtgttagccacattaccagaaggggccctgatccagacacccaagagagggttcttggatcctgcacaagaaaataatctggggcgagtccataaagtgaaagcaagttgattcagaaagtaaaggaaaaaagaatgcccttacccaaatgctgccagcaagggaacaccctctctggctgcagcccctctgaatggctcatgtcattgagccttactttctcattacaagtcccactggcagcatgaatggggggtctggagtcccctatatgtgactgtcagaggtgtttgaacaagagcaactccatcttgaatgggggctggataaaatgaggctgagacctactggcgccagttatggttaaggcattgtaagtcacaggatgagacaggaggtcagcacaagatacaggttataaagaccttgctgataaaacaggttgcagtaaagaagctggctaaaagccaccaaaaccaagatggcaatgagagtgacctctggtcatcctcattgttcattatatgctaattataatgcattggcatgataaaagacactcccaccagcaccaagacagtttacagatgccatggcaacatcaggaagttaccctatatggtctagaaaggggaggaaccctcaggtcaggggattgcccacccctttcctggaaaactgatgaataatccaccccttgtttagcatataatcaagaaataaccataaaaatgggcaaccagcggcactcagggctgctctgcctatggagtagccattctgatctctaggcccagacaagcccactctcccctctgccagaacaaacttcccctggtccccacttcctgagcattttcccaactgcctcctgcatttttcttctgcatcagtctctctcattggaaacactttcatctcccctttgagctggatttggggcttcccctgagcctctgaggtattgtctctgtcaccaattagaatataaaagctcagccatttatcaaagatacccagaaagcagtacctggactgaagtgcagacaggcatgtgtctgcaaacccagatgcagcctcgcctggcgtgcaccgtttccacccaacgtggtcaggaggctgggaatgcatttacagacggtccctgtaatcccacaggtgggtgaggggatttccattttacatctgaggctcagggaggcaagggactcccttaagtcctatgagtgtgtgtataagtacagccaaaaaaaaacgggccgggcacggtggctcacgcctgtaatcccagcactttgggaggccaaggcgggtggatcatgaggtcaggagatcgagaccatcctggctaacatggtgaaaccccgtctctactaaaaaatagaacaaaaattagccaggcatggtggtgggtgcctgtagtcccagctgctcaggaggctgaggcagaagttgcagtgagccaagatcacgccactgcactccagcctgggcggcagagtgagactccatctcaaaaaaaaaaaaaaaaaaaagaggcaacgactcaattaaacaagttactctcttgccaattctgatccgcttcctccttcaccccacaccacacccaatgtgcccaagaccagctgagaactcaaacattcctctgggtgtgtcaggatcaatgaacacagaaagtccaggaacacattctaatgaaacacggtggctcacagtgttcctacgtaagctttaggcttatttgcacatttttagacagtaaataggctcaactctgagacaatgaaatgcatcatttgccaggaggcgactccatgtgatggaaactgctagaacttggctggacccggttgccactttcccccttggtgactcgaggctgggatcttcaaatattttttaaagttgtcctatttaaaaaggaattgatttattctgaattgttcaaaggttgtgttaggaccagaaggcagaagaacagggagaaacttggctttctaacccttactaacagtaatggcacacaattactggcctcggagagcaatgtctcagacacgcagggccctcttcctcctacccctaagattccaccttggtctacaggtgagagccttccaggacctcctgtgtgacccagagtgtgtggggagagtcctcactccctcctaaacgaagagaatcagggcctagttgggagatacctgatctcaactgggccacatcccagcctgataaacagattcatggctgggtcaggctagcctggaggccaccacccaccgctctctactcctggtgccagctctccgttccatgcatgacggggtctgcaaggcaggcagtaaccctttggggaaccaatgggtgaggtggtgagtccagagcctgcctggtgggcccaggtctcctccgggcagactctaatgtctcagtttgagagagaagtaggtagaagactctgactttggccctatgagcattttccactcaagcgttttcaggagaccctgcccattaaagcaggggtctgcaaatgttttcataaaggtctagatagtaaatactttgggctttttgccccaaacagtctctgttgcaaccactcgatgccattgtcatgcaaaagcagccacaaacaatatgtaaatgaatgagagtggctgtgttctaataaagctttatttataaaagcaggccacagcagggctggatttgacctgtgggccagagtttgccaatctgcttgagagttactgggcctccaagactctgacacgcatttggctccatgagttcagagggcaaggtgggtgaaagatcgatgctcccatttgtcaattggaaccttgggggtcacccattaacctggtagatcttccaaaagcaccctggggtccatgctgtcatcatccccattttacagatgagaaagtagagactcaggctcaggaccttgccctggattcatattggtggtgacatttgtgttagccacattaccagaaggggccctgatccagacccccaagagggggttcttggatcctgcacaaccagataatttggggcgagtccataaagtgaaagcaagttgattcagaaagtaaaggaataaagaatggctactccataggcagagcagccctgagtgccgctggttgcccatttttatggttatttcttgattatatgctaaacaaggggtggattattcatcagttttcggggaaaggggtgggcaatcccctgacctgagggttcctcccctttctagaccatatagggtaacttcctgatgttgccatggcatccgtaaactgtcaaggtgctggtgggagtgtcttttagcatgctaatgcattataattagcatataatgaacaatgaggatgaccagaggtcactctcattgccatcttggttttggtgggttctagccagcttctttactgcaacctgttttatcagcaaggtctttataacctgtatcttgtgctgacctcctgtctcatcctgtgacttagaatgccttaaccctgactggggaatgcagccccagtaggtctcagcctcattttatccagcccccattcaagatggagttgctcttgttcaaacacctctgacagccacatagaggggactccagaccccccattcatgctgccagtgggacttgtaatgagaaagtaaggctcaatgacatgagccattcagagggtctgcagccagagagggtgtccccttgctggcagcatttgggtgagggctgcctagctgggcgtgggggcctgattccctccgaggcttcctccagctctctgcaggtgacaccaggctctttataaatagcagggcctgctttcaccaggacttgctggtctgctgctttgtaaacaggctttcttctatttgtgctctcttctgagcatcgttctatactccttgaggttagggacaccttgatagtgaccacaccctgccccacacagcctggacagatctctgttcactgggggcctggctgaccagtgatggaaggtgagtacgggagcaccgtcacccagagttcactaaaccttgggagtggacgacctgagagcccaaggtggccttggtctctgcccatcatgcctgatagagagcacctacctccaggaatggaagcagtgagggaggctttgtgtttttcaaaagaataaagtgcaaattggtggtctgactccaatgccaaacaccgtgcccaacaggagatccctgcgcagcctgccagcgctgacaaggaggaaacagtaacaaatgccatctccacgaaaatcacatcgcagcattcgcaggcaagagtgggggcctgggccacacactggctgctgtgtttccctgcaagtttccaagtcactgaccactagggatccctgccactttacagatgtggaaactgatgctctatcaatgtcatcagtgcgaacatctacccagcgcttggatctccttagcaggattgcaaacctagagttagttctagaatcacttgaggggccggggttctgttttattttattatattttatattttgatttttatagacaaggggtctcaccttgtttcccaggctggtattgaactctgggtctcaaacaatcattctaccttagcctctcaaagttctgggcttacaggcgtgagccagggttctgtctgacttattcacggctctctccagagggcattgcccagcactgacacacagtaggtgctcaaaaaacatgcatctcaggaataggtggcaactggggactgagaggggagagttggctgaatcccacagcccagcactcggcccctcttccctcctgcacccccagccaggtacagagttacatctgctcagcatccagacaccagagatgctctggcgagatggacgcgtgctttgtgaattagcgatctgcctcctacaagacaataaaaaggactaattaatttaaagccaacataaggcagcagcgaggtgagcattacttgtgtacaagcctgtatgggtccagcattttccgatgaaaacaagatccacccagcgggagcttctgctgggccagaccaactccaggtagctccctgctgggcagtggctggtgccaaaacagggcacacggctggagcaggtctccctgtatggggttatctgccagagcacagagctgcagaaccggccagcagcaggccaaggcctcggtgacaagctgcccccagcagctcctgcctccagcctccaggcccggcggagtcagctgccgcacctggtacttcatttacagatggaagctggcatctctcagaggtcttcagcctctggaaacaggcccaggggactgaccgaccctcagcatttgatgttggcaacatcttggcttccactaaaacctcgagtctgcagagggaaacggacttcgcatggggctggggtcaagtcttgacttagccacaccttcccagctgcccctgggcaagttattcagcctccaagtcacagtgtcctcctctacaaaagagacgatatatgtaaagctctaagaaaactgccaggccaatagcaattaagcaaggaagccggcctgctgatattctcagggatgaattctccagtctcaacaccatcggccagggaagagaaatggctattataaagcaagaagaaaccccagtttctgttcagcctggcagaggggccaggtcctgtctcctttctttgcacctctgactccactgatccctccagcctggcaccagctaaaggctcaggagaaaattcaatctgctcagagaaatttctgcaccactacttgcttttcttttcaagggcatcgttccaggtggattggatccaggacatctccccctgcctatgtagagagtggcctgacctgaggtcacagccctcctgggcagccctgcatctcatgactgagccaggtcatggggggctaaaggcttggctgtttgggcccaacttctacctctgtctaatcctgtatcctccccctccctatacaaagttgatcccccataaatatcatgcacctgccctctgggagtttctttctttcctttcttgaaatggagtcttgctgtgtcacccaggctggagtgcagtggcatgatctctgcttacagcaacctccgtctctcaggttcaagcaattctcctgcctcagcctcccgggtagctgggattacaggtgcccaccatcacacccagctaatttttgtatttttagtagagacagggtttcaccatgttagctaggctggtgtcaaactcctgacctcaggtgatctgcccaccttggcctcccaaagtgctgggattacaggtatgagccactgtgcctggcctgtttctatctgcagaacccaaccaaggacagccacctcctcccagcacaggcgcccactgcgctgctctcccagccccaccctctgtgggaacgccccacgcaggaccctctcatcttcactctttctacccctgacacccctcagctcagctcaaatcttacctgaaggcatctctctcttcttctcccttttcccttccaaacatcttaatttcctgctgctggctgtatgaggaattgtttaccaccataaaccacaatacaattccataaatacgttatttatccctcctgttattattccccattatttatttctgaaactctattattaaatctgtaaagtgttcggtgatacactggcaatgaaagacactatataaaggcgagtttattattatttttactccgtgattaaaacaaggaagaaaaatgaaccatattaaatcaaactggatttccttttgcccgcaggggcccctgctttgaggtgaaggacggacccccagggcctgggctgggtgaacgctctctcctccacactggctgctctcccagcttctttctcggctgctgttggtgacactagggagaactgcagatttgaaggaggctccatcgccgggcggagtttgttccgggcaaagcaaaaacgattccgtttgcaatcttactttttgccatcagtcactgccagtgacatgaaaaggtaatagaagtacccaggaatcctgcattttatttccactcagcagcatttctcttgcaggggaaacataaattcagccgatttttgtgcagattttgcaaaattagtctctttccatctagctctgtgtatatatatatacacactccatgcaggggcggaggggtggttctgccctgtgataagagagaatctcacatagaaaaactcatccagggagagatggaaggagggcaggaacaggaggcccagaggagagacgccgggtcagcgcacaggtgggaggattaggggcaagggcggggaggctctctgcatcacctggcaaagccctggcctttagtgcaatggttccctggaccagccagcatcagcgtcacccgggaagctattagaaatgcagattctcaggtcccacttcaggcctgctgaatcggaaattctagaggtacaacctagcgatctgtgttaacaagctcgagaggtgattctgatgccagagttggagaattgctgcttaactaccttgcaactcaaagggagaggaggcagcatcacccgggagcttcttagaagcgcagaatcttcagctttctcaagacctgctgaatctgaatcagcagttccacgagggtcccaggtgcttccctcacccattaacgtttaaggagcatggctttggtgttttgggcgctgggttcaggcctggcagggcaggggttaggaaagagcttttgagggtgggagctatggactggagctctggggtgacagagcaatgagtgggacatttagggataaaggagctggggccgttggagctgagtacccagaggcaaatgagaaaggcccaaacaatcgaatccaactccaacttttcgcatgtcagagttaaaggcaaaaatcatctcaatgggctgaacctgagacgtctgagtccttaggagccaaactgacatcctgtcattgttgttaaatctttatgacatgctcaccaaagaggaagcacagttgagcacgcgatggaatgatcgtgtgacggccttcagatacttttatgtactgtggggtgtcacaaaaccaagcgtactcgctgccaagttgggatttgttgctatggaaaccgttggactgagcatggagagactgaagtttcggacctcaatccccacgctggcccactgtgttgctcgagccaagtcaccccacatttccatagccggctcccactttttaaatgtctgttctgtcccaggcacagtcatttttttgtggcaagaatattgaagatctactctctcagcaattttcaacaactttcaagtatggcacacactcttactaactctagccaccatgctgcatgctaggtccccagaactcattcatcctaatgaaaatcttgaactcccccggcccctggcaatcaccatgctactgtccacctctacaaggaggcctgggacgttttacaactcattgttatctctgacaatgcatttcatcgtcattaacaatgcatcgcttaatcattactctattctgcctcagtttgcccagaaagaataatgtcccccttggttttccttcccatgtgatccacagtttgttttttatttttttattatttctttctttatttttagatggagtcttgctctatcgcccagcctggaggacagtggtgtgatagctcactgcaacctctgcctctcaggttcaagcaattctcctgcctcagcctcctgagtagcggggattatagatgcgcaccaccacgcccagctattttttgtatttttagtagagacggggtttcaccacgttgaccaggctggtctcaaactcttgacctcaggcgatccacccgcctcagcctcccaaagtgctgggataacaggcataagccatcgtgcccggcctcgtttgtttatcttaaaagaagagctgatctttgcacctatacccttgctcataaactccaaacgcttagcagttcaggccagcatggattcagcgctctacagatgcgatctttcgtcactcagaacagccctctaccttctgcccggctcgctcccctctactggtggccacccacatgtggcgtgttcacttgccccttccacagaaccatgtccaccttggagtgtggtcagcctgaaaccatgagggccatgctcaggggaggtcaccactgagcagttcaggggaggctctggactttgggacccctcgagcagcttcctaggaggacgctgagtggatcctcattctcactgtgagctggagtcaaagcagaccaggaaagagtggatctgagcagaccacctctacaagcctgatcagagcacagatggacacttcttggaaagacccacaactccccagtgagtggcagccacttctgcaccctccaccccgaggaaggaaaagagcagctgctgttcctggggaccagcctcgggccagaacctgcacagtgctttagaggtgtcccccaccccactgagtcctgagtgtacacccctccctgaagcctctccttgcctatcctggtctctgctggagtcgcaggatctaatggatggaaggcctcttacagaccacatggtctcatttcacaaaggagcagcttgacttgctggtgctcagagctggctcacaccacacctgggattaaaactcaggccgtgggacttgctgttgaggaattgtgtccaaaccaaccacagggagaggaaggagtcaaatgcccccagggaggccctgctgaggcaccagccacctggagaactagcacttgatggggagaggcaagcatgcctttgtgcactcattgatttgtttattcatccacctgtttgctcgcttgttcatttattcaacagctatttgtgtcctgccatgtgccaaacaccactaggcatggaagatatagtttggaccctagaagggttaacaggtgaaatggtctgccctatgctcagcctgattgactgcaagcaaagcctgaggaagtcaggattgcctggggaaagacccgataggcccccaaatgtttgctgaatgaatgcatggcaaaagagaagctgctgcaagcatagggacctgtaaattctgggagggggcttgcttgatgggtaaataggtgccctgaggtttgtgccctaaatgaccagcagtgtggtcgatctctttagacgtctaccctttttgaaaatggactttaattttcaagtatttgggcctcttgacacctgagtcctttcccatgaactcatccccctggggagcctggctggatctgtcacccatctcatgctgcaattcccctgcacaactctggattcatgcaggaggtcatttatttcttccctggaaacatctgtcatcagcgttagtgatgagttatgaggctggagagccctcagtttctctcaggacgtatttcaacctggacagctcctgaacagttctccctgcagctgctatgatatttctcagccccaatttgccctcttggctctgccaggaggtacagggtgctgggaatgaaaccctaggaaagagagttcttccttgagtccagtccaacgagcctgtctttgcacaggcacctgagaaacaaagtggtcagccttgtaattaatgtttctggcctctgacgaaccctttcctcttggaactggggccttgctggtaaccagagaggtactgggcctacccttctctgctgctctgggagggaactgtctctcccacctgggcctctttgggtaagaagcaagggaaaaggcaaatctcaaccctgaagactttatggaggaagttgcctttgcctctgagtctgctgtcttccatccacctctaagccattgctgtctcctttgtccctacctacttcttctccaccctcttcacacaccgtcacttattaactccaacctgcaaaaatagccaaatgatttccaagccctgaaagaggcagatagataatgacagagcgagttggtacggcggtaacaaattgtccgtattatagcactttacatcttgatatccattctcctcaacgggcttatctgtaaactgactgaattcacactgggatgctaagaaaatagctgtcatataatagatggggtctcccagaaaatgaacatttacaaatggctgtagcatttacttaaaatgtcatgccaattgcttgctgttgtctttatgcaatgagattgattttactgctccttggagtcctcagccttgatgggtagtttttaatgcagcagtgagatgcttttgcatttaatttataaatacagcatgccaagccatgcgctctttaaggtgcagccttgagaactgtccaaccctcttttgctgggatcctcctctcctctcctctcttctctcctcctcttcctccctagaggataagttggacctgggcagggtctgagttgatcctattcatgtattcaaatgtatgcagatgtatgcattttgtttaacaagttaattcatttgccaggccaggcagttgggggttttcacagtgtaatacccacactccattctcccttccacaccagattatgccctggagttttacttgcagaatttctggagttggagcctaatataggctggggggaggggctgcttgcctgttggagaagatggctgcagggtctccccaggataagaccaagggctctgtccagcctcccggttattctagaagccctgggaagtccagtgcacctggagaagtgtgcctccttgagaccacaaaacatgaccactcgtttctcccttatctgctgaaaagctacttacaactatcctttgactggcagccccagatggggaaacagaactccctgccacccccagacccaatgccctgtgttccctgtggtgttttgcatcctcttccttgaggaggtaaaatgaaagagctgagggaggaagggacggatgagctgccaaggctagatggaatggcccgttgcttctccctcctgtctgccctgggaagatttcccacagcatctaggagccttgatagagccctttccatctctagaagcctggctgtgcctatgagggaatggcattttcattcaaggcattctcggtgtgcagatctggataggagctggaattcctttggatgcgggtgtgtccttcagccgaggagcagctgatgataagcatcggctgcttatcatcattattgatactaatgatgcctcacctgggtcccactctgcaggacggctcgcacatccattatgccaccagatcctaggaagcagaggcattggcattctctctatcaatcatttgttcagcaactatttattgagcatctactacaagcctgaggctgtgtgaggacctgggaacagatcagggggcacaacagatttggtggctgctattgaaagcagctctattctggcagggaatggagacacatccattggtgcagcgtccctgctgcacctgagcctgcagcagcaaggaagggttgagggcgggcttcctggaggaagtgctatggaagccaaggcttgagggatgcatagaagccgacaggctgggattgagggaggagtgaggtacaaaggcagagtgttttcaggcagaggggacaatattttccaagaaactgaagctcagagaagatgagacattctaagtcacatgactaggaaatgagtgggagaccagtttctatgcccttggggtcccctggtgggaaacttcacaggtgaggaaactgaggcaatggtcaacacaagtctcctgattttgggaatcacccctccccttaggaggataaaccaatgagccagcccctttcatggaaaatgatcacctctcagatagattacagacagctgtggttatcaatgctggtctaaaaaagtgattagacagaatctaaataatgatttagattaatcatgtgcaaatgaccctctgtggggacaagaaaataataaagaaagccaacgtgttcagagcgttattacttacaaccaaggcctagcacattgttaatgttcaataaattgctgaaggaaggagagaccccccccccccaccaacttcctccatggagtctcaggcctctccctcctctttgcactgggtagtgaaacccccaagatcagatgcagagcccccatgcaaagccaggtcaaggtgtcaagtgataggggccgagctcagtggctcacgcctgtaatcccaggctgaggcagacagatcacttgaacccagaagttcaagaccaactagggcaacatagtgagatctcatttctacaaaaaatataaaaattagccgggtgtggtggcgcatgcctgtagtcccagctactcgagaggctgagaagtgagagaatggcttgagcccaggagatcaaggcatcagtgagctgcgatcacaccactgcactccagcctaagtgacagagtgaggccctgtctcaaaaaaaaaaaaaaaaaaaaagaaaaagaaaaagaaaaagaaataagaaaagaaaagaaaagaaaagaaaagaaaagaaaagaaaagaaaagaaaagaaaagaaaccactgatagaagcctggagctgagaggggcctaagttcaccttatccaacctgctccttatgtagagggggaaattgaaagctgcagacagatgaggctgtgtctaaagtcctgagagaactggtgtcagagtaagaactagaaggaagagctttagattcttctgcactggccaggccttgaaaatgcaagtattctcttctaaggaaagcagccccaggcgcttccttgaaaagtctgctcccacctcttgtgccaggggacctggttaccttggcaaccacgctgggccagggagactgcactccagccaaaagcagttatgggtaagccagacacaagggaggccagccagggtgttccatgtggatactgactgtatcagttgtctattactgggtaacaagtcatcccaaaacttagcggattaacacaataatcactttattatctctcatgatttctgtgggtcaggaatttgaacaggcaacagtgggaacttatctctattctctgatgtctgggaccttggctgggaagtcaagaagctaggaacaactcaacagtttgaggctgaaatcatctggaggcatcttcactcacaagtcaggttgttgatgcctgttactggctgggaactcagctggacttccaaccagaacacctccatggtatctaagtgggctagtttgggcttcccaccatcatggctgctgggttccaagaatgagagtctccaggagagctaggcgggattgcatggcctttttataatctcgccttagaagtcacttcatgtcacctctatatattctattggtcaaggcaatcacagaggtccttccaggactgagggagaataatgtcaaggtcagatggacattgatatggtttggctgtgtccccacccaaatctcttcttgaattgtagctcccataatccccacgtgtcatgagaaggaccccaccacacatggtcattgaatcgtggggcgggtttttcctgtgcttttcttgtgacagtaagtctcacaggagctgatggttttataaagggcagttcccctgcacatgctctcttgtctgccgccatgtaagacgtgactttcctcctccttcgccctccgctgttattgtgaggcctcccccgccatgtggaactgtaagtccattaaacctctttttctttataaatgacccagtctcgtgtgtgtttttattagcagcgtgagaatggcctaatacagatctggaagaggagatattactggggccatctttgccccagtaatctgcgcctaagcagggcctcagcaatctactcaaattcagttattttaagaagtatattattgagtgcctgttatgtgccagacagtgcactaggggatctcctgtgtcttggggagtttgaagaaaagtacacagcagctgctgagtcacactagggagaagcagacagaaacaagttcatgcgtggctggggagtccctgcctgcaggcctttccctcagaagcagccgcctttgtacagacacaggtgtccatctccaccctggcccccagcaaggtcagtgcgtgggccatatcagtgtgggtgtgacaacctggggtctggctgaccctgaggtcttgctatatcatatgtgcagcatcccctgcccttgagttcacaggagggcaagggagaaattctgtgtttatagcctgccatggagcagagtcgtggttccccattttcccctcctgctgagcatgacccaaagcctgccatcatcttccctttccacatccccacctgggctcctgcctccaaggcacagaagccttctcagggtcctttccggccccagcctccccagcctcctttcaaccaactgaatctcatagaagcagctggttttgctttttccctctgtcccaaagattttcaatctgcattgccatttttattttcaatgcacccccattaactcataagggttctcagaggccacctgattcttgcatacacccagccatgggcagctcaatccaactcatgtcgtttgcagacagctgaaccccttaggaggttctgcaatctcattcaaacaacactaaactcatctctagatcccactgtgcctctctcgccccactgaaataattgtggattaaaggaatctccccaggcaggactggcatttgtgcttatatataaatagggaaccttctgaaaagttaattgtggtggtggattatggtggtgacttcccagagagagacagggattgctttaatgaaatgaatgtgtgcagtgcaagggttgagtctaagctgaggggtttggcaaggggcagggaggaagggtggtctgatccaggaggaactgtttaggaaatgatgatttcagagaggaaggaggtcagcggaagctggataatttgtggcagagcagatctgatgaggagaaaggccagaaggaagggcaagagaaagtaaagatgaagccgttagcattcctaggggcggatgaaggccagagggctccggagggttaatgggaaaggtggctgctgggcagctgcttcaggcagacgccaaactggagagatctgggctcaaagcagaagaggacctgcttctccagcagacttgggggcaaacaggtacaactctgagttggactggagggtaggaagtaagggtggagcagcaacaaaagctgtaacattcattcattcattcattcattcattcattcattcattcgttttttcaacaatcacttactgggtttctactgtgtgcaaagcactgaattacgcaactccctagcagagggaattcccagggtgagctgaggaagtgaccttgtgtgcaatcaaaggtcatcctcagcagagtggactaaggggtccagggagcccccaagaatgccacagagggaggatctcattttgaggtgtttgggagccaaggaggataggtggctcttatagggggcaggaccctttctgtctcacctacagcttagaaaagctgcatccctgcttccctctcctgtggctccccagtgccatccgcatcctgtgcccctcctcactctgggtttccaagtcctctgtgcacgcctcccttcatctgatggtcatctcgttggtcttctgtcccctctgtcatcgtagcctgtcttgacccaccctcctaaaccccaaacctcgggctagacctgcctctctatccattcaaggaagttaccccaaggactttccaacctgtgcctcacccacaaacggtggtgcagcttgggagtggccattcccctcctcttagaactccatgactcagtggctgtcaactggggcaatactgcccatctactggacatttggaaatggggcaggggcagttgtcgcaatggccagggggtgctgctggcatttggagcatggacgccaagcgtaaccagccccgtgcagtgccctgcacagacccacatggtgaccagtcgccaccccccaatccccgagttgccctgctgagaaatatgaagcaggggccttcccagcaccccctcctacccccactctctccaggctatcagggagcgtgacctaatcacgcatgcctggctcagcccctctggcctcttgcactccttctgagctgcggaaagatttccatccttgtagatatcttgccctgccaggtgctggctgccattctggggagtattttcaattcagcagggaggacacagcagccccctgtggccccacagctgtgccaatacagcttttatggtaataaggctgcaatctttgaactcctggttccaaaggagtttgacgccagagtccctctctcatctggctccaaactcagagaaaggaccaccgttgtgactgaccaccagtgctcaaagcctaacagaccctgctggggaggttaggagggtctgggcccggagcctgcaaatccaaccagcaaaacccatccagggcatttccaggaaatgggcattcccgcccgtctccaacatgagcactggaaacgcttttgtgtatcttcattataaccttctctgccctgctgcttcccttgtgcattggagatcaggtttctgtagacacccagggcatcatgggtgcagccatgaagccccagcacctgaactggaaaaagattccttttcctttggtctaaggacaatgggggaagggagggctaaaaacaggcctttgatacacctgatcgatgtgagaaaattgttctttcattttaaaattgctcttggccatgaggacatctgcaccccatgcaccttttacagttgttctgtgtttggctccaaaccactagaagacagatttattggcagttcccagatgtccaggccagaactgcctcttctgaccttggtcaaggtcaagggaagaactagcctgccttcctctcccttgcagctctttctgcttcttcctgggcaacagcaaggggctgtggtgtttgaaaactcacctgagaagaggtgacacctgccatggagctgctggtggagagggaggcctcactgctccagagagagtgagaaaccagccacattcaactgctcagccctggtgagcttgcctgagattggagtccccgtctgtggctgtttgaaagagggcctcacttcataaagaaggcaagcaatccttcctcacctcccatccacagaggaatcctggctacagctggagcaaggctgggtcagcttccagaccctccagctccaactccagctctggaagctgacccagccttgctccaaatgtagcttccaatacacgagtgtccaccatgcatcccaagcaggatctgtgccatcttctggccatcacacccaccctgactctcactctccctgtgtgcctcactccagcccggcccattgtccccgagtagatgctatccccagacaggaaggaagcccctcaagatgccaggtgagttcgggttcagaccccaggctgagctgcccgggctatgttggggaaacccttggggcactgaccaggagccaattaacccccacaagccactcccagggctccaggtggaagaacagacttatctccctggtcatcctttgtctccatgctccaaatgccagcagcaccccctctgcactgcgacaacttacccctgccccatttccaaatgcctggcacatgggcaacattgccccaattcctcccaatgccttgctctcagtagatcccctgcccctgtgccccaggggaggagagggacggccgggggtgaagggcagagggagagaccgacctccagagcaactcctgagtccacaggaacaatccacccatctcggtggctggagccgcccccgtgcccagcaggccctgtcctggctcagcaccgcaggggggctgctccaggagcctctcctctctcagccagggaggcccacagcctagtgccgcctgggtcttcagggggtgtgtagacaccagaacactcaggctaccctggaggtattctgaacacctgggccagccctggatttttcttttcttttcgtttttttaaccactgatggcatcctgtcctcccacagctctgtggaacaggcagggccagtgtcacaatcccattttgcaaatggaaaaacctggaggcggcccctttaccatttccctttataaggcccaccagagctggcacagatgtgagctccttttccatgtggtccctcctgaagctgtgttcttctgcctctggctgcctccctttgctgttgtggctggggttgggaggtggttgtggtgctgctgctcccagagagctccgggactctagtctcctcatctctcttcccactggctccaatccccaccatctactccagcaccagaaagacctggaccaaaggaggtgggtaaatacagaggaagcaaggcacagaagccgctaaggtgtgaaaaccttcaggatcctgatgatattcaaacccggaaaggtctccaaggaggaagtgcaagccgtatgctctctgaaccattccccatctttgcatgtggcatttggcaaaaatcaggtcggactggacatccccgagatggagaaaaagaggtggaggattgggttcactgggtctttggcaaaatcagagagccaggacagcctgtctccaggtcacagagaggaggcacccaggccccatgacagagggtgggaactgagggtcacagaatgccctttcctgaagagtcggcaggggcctcaggccagtctttgggggctgcaagactctgagtctcaaggtacccggcggagcccaccacacatgacctgcacgagggactcgggagtccaggccatcggccaggatccccggcgccctgcggtctgtccagcccctggttggaagtagagacgacgtcaccttgggcatcagggaggagaatgatgcacgagccagcacaataagtggagacagatctagtttgagagtctccgaagatgatattactcagcagcctcacgcttttcatctggaacttattggaaaacctcgctaaggggatcagctgcctcccaggttccgactcccagctcccatccaattggcattaaggccctttaaagtattacttctcgacaccatgagcattgtatgttcctgacaggataagcctgccacaaattaatacctggggcagatcctaaaacacaattcttcccggctgcaataattccagccaacccctctatctgcgctgacagatgcagtaaatctttcatcgttgcaattcatattgtttttttcctctggtacctgaaatagccaagacaataaactttacctccttttatgattatcgatgtgcttatagggcacccatgctgcctgcaccagcaccgacccacccggggtcccattgagcctgtagggaagcggctccctttatcctgcaggctcacaagccccatgtggaggctggaagagttggtgggctggtgtctgggagagacagaggtgagaggctcctgtctctgagaagctgagggtggcagtcaaggaggagggaggggacctcagccctgaggttgcagggagagaccagggccagtgaggacagcggggagagcctcaggacacagaggtcctctgcctgcccttgtgccggccaaggtacatgagtgacaaactctgccaaggtcctctgtgcaggggactctgagaattgccatgcgacctgcctcattccacgttctccttattgacaagcacatcacagagagccagatctaggtcctagccccacaggccttgatttctccatctgcaaaatgggatttgtgacaggagccctgcctgttccacagagctgcgggaggacaggatgcaggctgtacatggcaagaagccaaaacatgacgtccagggctgggcccaggtgcccagaatgcctccagggtagcctggactaagcaagtctgcacattagcaggtcagccctgcagggcctgggggcgtggaggctgcctccaactcctagggctgccacaacaaattctcccaaagcaggaggctgaaaacaacagaaatgtgttttctcccagttcaggaggccagaagtccgaaatcaaagtgtcagcaggattggttccctctggaggctccaaaggagaatccgttccatacctctctcctagtgtgtctctcctagtgcgtctctcctagcttttggaggttgccggcaatccttgttatttcccggcttgcagatgcatcactcccatctctgcctccgtcatcgcatgaccttctctctgtgcgtggccctgtgtgtctcttttttccttttctgagacagggtctggctctgtggtccaggttggagtgcagtggcatgatcatagctcactacagcctccacctcctgggcttaagtgatcctcgcacctcagcctacttagtagctgggactacaggtgtgcaccactacgtctggctaaattttaattgttttgtaaaaacagggtcttgatatgttgcccaggctgttcttaaactcctgggctcaagtgattctcctgcttcggcctgccaaagtgctgggattacacctgtgagccactatgcccggcctcttctccttgtcttataaggacactggtcattggatttagggctcactctaaccctgtttggcctcatcctaactaatcatatctgtggagctcttatttctaaactaaggtcatattctgaggttctggatggtcatgaacttagggggacaccattcaatctgctacaggagttgggggtggtgactctgcctgaggggctcctaacagggcccacccccagtcatcttcaggtcccctgcagtcagcactccctccaaggacacttctctatctgtcccaccccaagaactgctcagaggcaaggccatcacctcgcccaactactccctgaagacttggggttccctacggagtccaaggaagcacagcttagccctgaaaacatgccagctgctcatttggctgagatgcagctgatccctatccacaccttggtcacctgttcttaacaaactagcacctgctacctgtaatcccagcaatttggaggctgaggcgggaggatcacttgaggttaggagttagagaccagcctggccaacatggtgaaacgccatctctactaagaatacaaaaattagacgggtgtaggggtgtgcccctgtagtcccagccactcaggaggctgaggcatgagaatcgcttgaacccgggaagcagatgttgcagtgagccgagatcatgccactgcactccagcctgggcaacagagcaagactctgtcacaaacaaaaaacaaaaaacaaagaaacaactagcacctgctttaactttccccatccacacccccccacctccgccatgtggctcatcctccctagtcaattgtagaaggatgacccctctctgacggttcctccagggccttttccccaaaggtggagagtcttagctgtcaccctatagaagcacattcccaaattgcaggtaaattatacatttgccttttaagtagcactttaagctggcagggagacagatttctatcagtggtgaatgcccacctcgggctgctagatttcatgcagggttcgtgtgatgggtaataactctcacctccctccctttatgaagagacatggctcttgtctttccgcacggagggaacaataacacacacatcttgccccgaggtctcagaggctgcgggctcctcacctcctgggtctggagcccacccaccagtgcctttactgccatggcaactgcccgtggggcctgaaaaggtcccatcatgacccctgtccgcggtgcccatgccaaagcagctgccactgttgttgtgcccgagaacacgaggatatttgctttccaataactgtcctcctgtttaatcgctggagagaggtgcttttgtcacctgctctataagtaaatggtcttggcatttttggcaacaggctcttctcaaagggggagatgcttccccctgggcagggcttctggagagaggaggccaagctgttttgcagaattctcctgggcatttgtccttcccgatctcctcccacacttcctcaatgggaggtgtctgcttcctaacccctctccagatctctgagccttgactgtcccagatgacctcctttccctccccagccagggctgaaccccccttccatgccatctccactgtgccttctcctgggaccctgctgaggctggaggctctgccaccagcctgggcacttgggagatgaagtctatggttctgctgtcaaaagcatgagcaccccaggctgtctaccatgtgaaaagacttcccagagacttctctgtcctagataagttgtgaaaagccaagatcaatttgcttctgaaaatcaggtagatcaatatgaatagcaccatctgctgaggagcacgtgtgtccatgagcagtgcatgtgtccgtgctcacgcaccctcgggggtgcccacacccccgctcccttcctcactctcccacccccaccctccccatcttatttgaatctgctcactatttcctgacttaacccttttttttcatttcagaagcaacaagacagtaaacctaaatcccagggaagtggctgtgtgttcactctgagtgcaggggacattgggatgtgcagtttctgggaggagggtcccctgccctgtgcacccccatctccagccccactcttctgcctcccaagccccaggcaaaatcatcagcctgtgactaactttgggggactaacatagcagccaccaggaggccagaggtcccaaaggctgggcaggtgtcactgaagtcccactgcctatcttaaatcacatctctgccctcaagaaggtatgtggtgttggatgtgggtgatgaaccctaccaagcttcaaggtcttcatctgttcatcagggatgatgcgatcctccacgggttcctgcctgacacagagcaagcacccaactaataacaacaacagccagcgcataggctgagcatccctaatccccaaatctgaactccgaaatgctccaaaatccgaaatgctccaaaatccgaaacgctccaaaatccgaaactttttgagcaccaacgtgatctcaaaggaaatgctcattggagcatttcagatttgggattttcagattagtgatgccgaacataatccaaatattccaaaagccaaaatccaaaacaaattcaaaagctgaaacacttctggtccccagaatttcggataatggatactcaactggtatttgccgcatgcttgtctaagtactttatgcatattaactcattgattctttgcaatgatcccatgattacctgtgatttttatctctcccactttagaaatgaggaaagagaggcccagagaggtcaataacatacccaacgttgcggagctagtaagtgtggtgtcaggatttgaacccaggcagtctgggtcttgcacctacatgctttgtcctgccattggtactatttttttgtgctgggtcaggctaggagtagagatgcaagcccaaagtgcattggctcagcccttgtcctcaagaatcttccccttcctctagggcacctccaaggtgaagagggaagaccccgggctccctaaggccttgtgcagacagaagcttcagccactgagaatgattgaaccacatcgagcctgtctttcccactatgctcagcagttttgcttggaaaatgatgatagagtaagatttaaaagcctggagaatggactattattcttatcagtgctaataaaggtgaaagcgtttcatttcctggtgtgagtgtggcttagacgacagaacgccttgctccctcctccccatgaactcccggcctccttgtctctggcatcttccgagaccctcccaaagcccgagctcctgagagcctcaccccatcaggaaccccagctctctgcagaagaaactcctaaaaggctagtagggcagagtgatggcaaagtggggtgcattgctccccttgggggttcattcagcaaacattcgtcacgtgcacattttgtcctgggcaacaagggtatttcagtgaggcattgcctcactctgatttcatttcagtaggggagacagactataaaaataaaccaggaaatagataatacaatgtaaggtaatgagccatgcttcaaagcaaaataaagcagggaaggggggctacagactaaggggaggagagtatattagtaacaaggcagaaagcagacccctcctcaactagtgtgatggggacaattaataaagggacaaagaggtggacagagtcagaggacccactcagggatggccagtcaccctggacccagcatcatgggaagctgcctgctgccacttctagacctaggagcacggaaagagaggagctgccagagctgagagtgggctgtcgctgtgaaagtgaccctgtggcccactaatgagagagctgagaagtcagtaccccaatctgattctcctcccgccttctggtctcctgtgggtgacttcgtttggccaaacccaactggaaggcagagggtaagggggcttggtcgatgcagcccactcagtcagcctcctgtgacacagagcagggtgggaaggacagggtgctggcctagagggtcaggcagaggctgggcagctccgggccactgctattccatatagaatggtcagagaagacccagtaatgaggggcctttgagcagaagcctgagatctctgttccccacctccactgacacgctctagacaccttcctctgctttattcttctctccctttgtgaccagccacagatccgtccttgccccttcaaaggaactagaatatcttcccccaagatccagctacagtggagactgaacataacagccaccaggaggacagaggtcccaatggctgggcaggtggcactgaagtcccactgcccatcttaaatcatgtctctgcccacaagagggtatgtggccttggatgtgggtgattaactcccccaagcttcaaggtctttacttgaagatgtgcgggtctggcttttcagggcatcatggcggcaagacgatgccacgtcttacagtggcaactgccagtggcccagtgtagtttctctaggcaagtggcagtttttctgaggtatgagggttaccctgggccagtggcagtttctttgggtcggtggcagtttctgtgaggtgtgagggtcacctccaccctcccccccgaccccactgctgctatgcagtcttcactaattcctgagagaggaggggaagccactgagacaagtgaacaaagctcaggccactctggtcccttcctcctctggcacattcatggggaatgacaggtgcagaggctcccaaaggaaggctcctccctgctcttctgtgccctggagagggctctatggccactttgggccctctgtgcgcctctcgagcacccacattctcttctcctctcctgcatgggaacatgaaggtgtttccttgcacactctaccacatgaagccacttgctcctcatccacttgcagcttttgcaatcacagcctccattcgtttaagactttttaagattcaccttaaaaaattgagtcaatgaggccacaaaattagaaacacgcacacacacatacacacacacacgcacacacatgctgattttcactgcaggcttccaaccttatacggagctgttgacattcctgaggctaagggaaggtcctgggagattcacgcccattctgctcctccatgctccatctcaggccacacagcagctgtcagcaggtcccccttaagacctacataacacccagagtgctctccaggtctgcaaagagaagagagtcttagattctttttcttgcctttgtgacagtctctctgttcctcagctatccctttgaccccagagcgccttctgatgccttttctctaagaggccctgtccccggggtgcaccactgcatgataactggctttgtataggttggcttttagacgctctgtgtgcttcacactcatcatccttttccgtagagttagaatgaaatgcaatcagctggctggatatccattgctcttggaataaatttcaaattccctaaagtgacctacaaagctatgcatgatgtgtctgtccagctccattacatgacccctccctctggctcactatttccattcatacctgtttcctttctgctccttgaacacaccaagaccctttctcctttttactatgtacttgccattctacctgcctggaatgatttaactccagctcttgtcatgcatgatggttcattgtcattcttcaggtcttaactccaaagtcccctcttcagagatgtcttccttccctaccctatcaatgaagtctctctctgcgcttctaggtcagtgtcctgctatacctctgactctttatttcacagcattcataaccatttgtagttatattgttggttgagtgttggtggcggtagtaatggtggtggcggtggttgtgtgtgggggaggggtgtgatctgtcttccccactaggaagcatattctttgaagtcaggaaccaagtctgtatttgtgcagtaaaggatcaactttacccaaagaaaggtttgggtctttggccctggctcctgggagggaacctctatgtccttggaatgccctgtttgataagagcatctttgtttacctggggtcttgggccaccctaaattttctatgctaacaatatgatttgtggtaggttgggggggtggtcttggaccacttggtataagcttgacttctggaaggcctagagactaaggtcaacctggcaggcagtcaatcgtgtctatgtgactgagccccaatagaatctctggacaccaagatttgggtgagcatctctggttggccagactctgtgtgtgttatcgcacatcattgctggaagaaacaggtgctgtccaaagttccactgggaaaggacaacagaagttcatgcctggtctctcctggaccctgccccatgtaccgcttcccttgactgatttccatctgtatcctttcaccgtaataaatcacaaccataagtataatgcctttgctgagttctgagtccttccagtgaatcattgaacctgaggctggtcttggataacccccaaacttttccattggtgtcagaagggaagtggtcttgggaacccacgaccttttcagtgttatttaccactatcttcttagtgcatagaaccacaagtggtatgcagtaagtgctcatgaagtatgtattgataatgaaggttcctcttgacacaaagaccttccaaatgcagccagtagggctgggacatgttctcaaccacctgcagcttcctcataccacctcattgagtttagccccaccaggtgtcttctagttcccagaaagtgctgagctccctcaagcctctggactcttctagaagttgtgtgtgttgtctggggattccttcatccaccacctccctgattcctcattgtccttccggatgcagctaatcttatcacctcccctggggaaaattccataggccccgagtttccaagcctacctgagcttacccatggcatgctgttataatctctgctgtaacacatggcatctgggttataatggaaaggagtctgagccttctcttcctagagctatgtcgcatttgcagaggatcttctgcttagatacctcttctctgtggcaggtggactctaagatggtctaagctgatccccacctcgtggcactcacgtttgtgtcatcttctctctttgaatgtgggccagactggcaacttgttctaaccaaaggaatatggctaacataataaatgtcacttgagctcttttaaatccaggaactgtgtgttttatctgtaggtctttactagcaggtgctgtgccgattgcatagcagcaaatatctgcatcaacaaacggatcaacccctcaacaaggagaggtggaaggaaggttaggaacatggtggaaaattgttttaaaatgatggttgtgtagcagatcttagcatcattttcagaaacaagattctatctactcattctgatatctacacaaaaggataggagataaaactatcaggaggtcatcctctcaataagcttctttggagtagaagtgagctgccctgcccataggtaggaaacccatgcctctaagctttgcagaatgttcacctaatcttagatttgggtcataggcactggagctggctaccctcttctctgtggcaggctgactctaaggtggtctaagatgatccttacttcctggtattcacattcttgtgtaatctcctctccttgaacatggtcttgcctggtgacttgttctaatcacaggaatatggcaaaaataatgattgtcacttctgagataagttttaaaagattgtaacttctctcttgctagtggactttctctcttgctggcttctttggtgcgacaaggaactgagagaagcctccagcctacagccagctgggaacgaaagccctgagcccaacaactgtcaaggaactgaattttgccaacagccacaaaagtgaacttggaagtgaagccttttccagtcaagccttcacaaatggcacagtgcccactctccagccctggctaacacctcgattgcagcctgagagacagtccaaagcagagggcccagccaggccacacccagaggccccacccacaaagactgagatcacaaatgtgatcgccttaagctgtgaagttttggagtgatttggggtgatttgttaaacgcggtagataactaacatgctctcccaagcgctcatcaacaccagatcatacctgactctgctgttagcagcacagtaagacagtcaagccatagacgccagagccatatggcctggattcaaatctcagggcctctactttgtgcctgtgtgaccttaggcaagttacttagcatcagctctctcatcaaggacataggaatattacctacctcttaggactgtcatgaggattagattagatcctacatgtacaatgcttagagcagtgataatatttgtaacattcatcctgtccattatatcatataagtgttgatggtatttattcttcacggctaagtttcttcatggtaagtttctacttacattagcacatgcaattgaccacacaccacccatacaacccagccctaccacaagccagtagaaggaaggccttggggcagacagcagccttctctaaccacagccaggaaggtcaaggcctggtcctggaacctcaaagctcacctcctcctctctgctcagcatcccgaccacccctgcttttggcataccaagaaaggagttgcacacacaggtctagtctgatcattccactatttgcaaacacatttacaaacagtcaggatccatttcccttgaatgttaaggggaattcaataccaaatcattacaattcaatcccattatggacagtcataacctaaaacagttctcggcaagaaaacaccaacgtagcgcaagccacagcttcactgcccccagggctcacagctgagtggtacctccagcctggaggactccagacttcagcccagtagcagagctacctgtgtccaggaagagggtctgttagaggtgtggtggtctagggcaggctcagtgcaagagtttgctctggagtcagaacggttcctcctgtagctgtcaccatagaaccaggccaactttggcaaatctcaaggtgtgtggttgctacagcacataggcctctgtgggtgtggtgtaagttgtggaggggagggagctggggagggaaaccagaaggatttccatccctcctgtgcaagggcctgagcacctctacctgggcttctgtaccttgtattttcccagtttgcactgggaagcttgccctagcctgcagtcaagctacctacaaagtcaacacaacatgcgagattgcctgcaggccagctgttcgtattagagagaagatggaaatactctatggcaggataagaggagaagaagcattctagaagcgggagtctgagcacaatttatgtcctgggccacagagagcctgtcactcgcttcccctgatagagtttgacccccatttactttgtaaaattgcttatgggcacgcagacacctctgaggattggtatcgccagtgttgccgcctgggcctctcctgggatatgaagccttgtgtttttgttctcccattccctcaaggtgatggtacagagatgttagaaaatgcaggaagctgcaagggcctgttgcctgcatgagacctggtgtgtgcatgagtgcatatgaatgaatgtgcatgttatggctaatgagcatccacagagattctcaggatgacaggatcaaataattgctgtcagagctatgcttctgattagctttctcttccaaaagctaattgtccaatttcataggcatctgctatttttcacaaatgtgtttgaacttcacaagccaagtgattttttagcagacagtcaacaactcagaaaataatacatcctgtatcctatcttgtccctctcaactaaacactgaagttatagaaggaaagctgaacagacgttcgatgcacaaacttgccaattagccctctcacaccagagtcagggactgtttttcactcgatgaatgtgttgaacccagtggggacaaagaacagcaggatgtgcgcaggcacagaatttctctccctaacagccggggcatgctcaaggagagccagagtgcagcagctgagacctcacacccgtgtggggctcgaatcagatctgcagtgtgcatgctgtctccaggcagtcatgttctttgaggtgaggatctcggcaggtttcatgccatgttcagtgggaaatgggattatacaggtttgcagcttgttacctctggcttcccacagccttcatgctgtgcatctgtgtcaggtaactcttgatggaccaaacatctgtagccttgcaaggaaacatccaatttccctagaatttacctaacttccctttccctcaatggcagagctactaaactaaagagtgggaataggcccgagcgtggtggctcatgcctgtaatcccagcactgtgggaggctgaggcgagtggatcacctgaggtcaagagttcgagaccagcttggccaacatggtgaaacctggtctctactaaaaatacaaaaattacccaggtgtggtggtgggtgcctgtaatcccagctactcagggggctgaggcaagagaatcacttgaacctgggaggtggagtttgcagtgagccaagatcacaccgctgcagtccacctgagcaatacagcaagactcagtctcaaaaataaaataaaataaaataaaataaaataaaataattaaaaaaaaagagtggggataaggagaggagtgtatcagtcaggataggaagagttaggctccagtagcaaacaacaccaaagtctcagctgcagaaacgtgaagagcccctttctaattcccgctatgtttccatggggctcttcccctgcatagtcatcatccttgctctggaatctaagctgatggagcagccaccaccaggaaatttgctgatcaccgcatggaggcaaaagacagccatagtgggtcttaccatcagcacttaaatccccagcccaaaatgacacaattcatcggccagaagtggccacatgattccatccaaccacagggggccagttagtgtacttctaccatacgcctggagtatggaagaggcagagtattgggcaaaagatggcacttatgaccatcacaaaggtagttaaaatggtccaggggctcattggagaaagcaacaaggaagcagattcaatacccttaagagataaactttcaaacttccagagacttctttgagtgaaatgaattaccagtggaggtggcacagacatttgtagaggtggttccaacaattattaggggtgaaattaaatctttaagatcccttccaaatgaatgaaattagcctccaccactcacctggtcttaaataatcttgtgctatggtttgaatgtgtgtgttccctccaaaattcatgttaaaatgtaatccccattgcaacagtattaacaggtggggcctttagaccctatgggggcatgcagacacctgcatgaatgggatcagtgaccttctaaaagggctagggggaaatagctgggccctttttgctctttttcatcccttctgcaaggtgaggccacagtgtttgtcctctcaggagaatgcagcaatgaggcaccattttggaggcagagacaaaaccctcgccagacactgaatctgctggcaccttggtcttggacttcccatcctccagaactgtgagaaataaatttctgttttttataaattacctagtctcagatattttgttatagtagcacaaacgggctaagacaccctgtcacaaggatttggtcattcagatttgcgaaggactagcaatctgaaagaaaaactgaaattgagagacagggttgaggttggagattcaggtgaggcaggtgaatacacgaactcctgttgtgggcttagttctccctttgttagctccatgtttatatcatggtgctcctgaggctaattatggttttggttcccaatctgaggtcacgtgagcttagatgtggatctttccccattggagccatcagatgagaccccagccctgggaaacatcttgattttagtttgcaagagactctgaaacagacgacctaggtaagccacacctagtttcttgacccacagatactgtgagataataaacatgtgttgctttaaactactatgtttcatggcaatttgttatgcagcaatgggtaactaatgcaaggaggtcaatcgaaggggagggtggcacaggtattagtgtttgagatttgtggctggatataagtcagagaggaaaacaagtaggctctgacccaagaagtttagatagagagtggcaagtggggtctcaggcaaaggggttggctagaacatttgctgagcctggctggggacccctaatacctgccaaagatgtcggtaaagtggagaggtctggagccagatggagaagtagcttaactttcaaagagcccaggccagctgagagcctcaccctgtcctactcatagatgatcagttgagtcatcctgaaatatacattcagaactatattaagggggccaataattgctaccacttattatgcacctgctatagctcaggctcagttcttttgccaacatgacctctattctcatgactctgagaagcaggtgtcattattcctatttgaggattagaaagtgaaattcaggcagaccaataacttgctgaaggtcattcagcttgtaagtggcagagctgggttcaaacccacattgagccccaaagccagtcctctttctcttagaattcattctcccacccaccctccaggcaatcagatgggccccaggaaaacctcacatcaagctgactttttccaccaccttgtcacgacccacttgcataatctctcagccattattattcctctcataaaacctcatccctattaaaaagtgtttcctcacccatcagcaccctgattgtaaaatataacaaaaaacctgtcttttgcttaatttcaagatatttatatgacactttgaaatgtcaaacgttttcattaaatcctctcacacttgggctgacaaagggacaccgggatctttgggagacactttaatctcaatcaattaggaataaagtagtcctagcagtgtggtgataaaagaacactttaattttagagctaattaaatatcaacaattggaatgcagcaacacttaacctgcagtaacccattatttattaggaatataatgcattgactctgggtatgaagtgagttgtagtattttaatatcagctgtcacagtccagcgggtcccttttgtttcactccagcatagtcatttcccaggctctgctgggatcactccagcaccctcactcaacacaagattaattaagctggagatgagcacacacacacacacacacacacacacacacacacgatggccatgagggtgccttgccccaggcaacacaaccccgagctggcaagagggcagcctaggcaagtaacagttgatccaggcatgtcagaagcctgagtcttggaatggacaaattaggatgcttttggctgcaagtaacagaaagaaaaagaccctgcctaaaagaacattaacaataagggtttattatcttacataaagaaaagcttggggacagatagggttgcaaaattggataaatctgaggcttgatgatattgtcagctactagcagctctcttctatccactctgccatccttcacaggtgagtgatgtcacttggtggcagctgcagctctctcccacatgcagggtggggtcttgcaaacaggaggacgcttctctctgtgcatcttttacccctcattcctttttgttacattttttagtttgtaatacatttagatgtaattaaaagctgcaaacatagcacacagagttcctgtatactccccatctagtttcccctcttataaactaaaaggcaggttttattcggatctcactaatttttccactttcttccctttttctgatccagggtcccacccaggatgctgcattgcagttagtggtcccgtgtcctcagtctcctctggtctatgataatttctcagtcttttctcggttctgacaatcttgacacttttgagaagtgccagttagggatttactagaatgtactatcacgtggctttgtctgatgtttttctcaccgttaactgaggttatgagctgttggggaagggaccacagaggggaagttgtccctcctcatcacactctatcagggggtacatgatagcacacgacatttctaatgatgttggccttggccaactgatcaggatagggtttgccagatttctccactgtagagttgcactaccgtcctctctccctgcacctttttattggtgaaaataaaaataaaaataaaaataaaaataaaaaaccctttcttaaagccatctagctcttgtccccttgaccccatgtccacgcctaaccaaacaccagcaaactgaatcaaataggttttaacccaccataattcacaccctggggctgtgggcgagtgggtggggtcatcatcactgaacacacttgctcaaacagagctcagctaagtgagaaggaaagaggggtggaaaggggaatcaaacagcagacgggcatcccacagtgccggcccctgaaagtcatctgcgtgaacatcactaacctgtcccagcagcttgccctatgcagtacaaaaactaatgaagggtagctacaggcaccaacagacataagcaagtcaccaaggaatagctccaggataacaccacaccacatcccagtgacagtgccggcttgggagccagactgcttggctggttcaaatcctgcttctatcccctgccagtggtgtgacctcgggagagttcgttacgtttcccatacctcagtgtcttcatcttaaaaatggggatgattatcataaagtacacatgaagctgaataaacacatagtaagcctgtgtaagtgttagctatgattccatttatattgagctcaataatgtgcaaaaataaacaacctgttgttaggaacacaatcgtgcatggtaaaactatatcgaggagtgtgaatgctatacccagaagtcagcacagggcttctctgttaggggagaactgaaaggaagacagatacccggggtcctcccagctcctataatcatctgtttcataagtggggctcacgggaactcactgtattaatttttctaacttacatacacatggctcattgtttccacaggtgagaattatttcataataaaagtaacctgtcaggctcctctgtgccctgtcttcagaggtgaggtggagctccctggagccagaggcaagctggactgctggttggtagctgcaggatacaaaccttccgctgacgatccacagagataacctgccctctgggtgctggagtcggagtcaggcccacgtaggtccaactccgtcatttttcagcagtgtgaccttgatcaagttacttctcctggtctcactgtttttagcagtaaaatggaaatgcagaggttttaaccctccaactaatcagggtttggaggaggatctagaagcaaggtcaatgaagatgttacctcttgagtcattgtgtttaaagcctccggcaataagctcgtgggctggctactccagacctccctggtatccctatttcaccatgcaaaggtctagttccctcccctcccctaacagccataagtttgcccttggatctatggctctgacatctggtctccatcagcatttgcagtttccatttcttggtctttgctcctggtgtgacttcccctgacctactctgatggctggtcagcgagctagatgatcattcatttctagaatggtctgccagactccagacccctgttcatctctggaaatgctaaagcactgaaggagtagaaagaattgaaacatatggctcacttcttactagatgtaagattttggacacgtccccatctgttcaacgaagatgacagtcactatcttgcaagaatttttgtaaagatggcatgaaataatggatgcggagtatttaaagaacctggagcagcatgatacattacatacctgatggttattaggtaggcaataaacaggagtaataattactacaatatccagcaaatatagtttacacttaaaaagaattggctgcatttttctttcacttttttccattgatttttacaagtaaatgtaatcaaggtcgttggctgatatcacagtttgcgtcgctaatttgctggaagccttctgaccatgtacctagaccttgatctgtgatttactgctgtagaaatggtaacagagaaaaagaaagagggaagaggtgacagtctacttttaaaatttcaggataaagaaaatagctggtctggcatcaaaatgaaggttgtcatgatggctgattctcacagcaaaatacgtgccttcttaagggaagagagaaacatgtttaactcaatcctgttctctgctctcatcagagaacagggcactggctctggaatggatagtataagcaaatgtggatatggggcataaaataaatgttaggattgcacctttagagactatttattccatctccctacttagaggaaaaactttgcctaaataaagtatggctacgaggttccttttcaagaccagccttgacttggagagtaattgacaggaacactgcattaagaaggattctgctgcacattcccggctaagctggaaagatggcatgatgggtggttatgtctactctgggtgcaggaggagagtcatggctgcatttatgggtctatgatcagttttccatggccttgaacctttcctggttctcttagttagaatttggaaacatggtcaagccacatggtcaccagtcagctgggtacgacgtaacagctgcaggcatcagacaggacaggctaacgttgaaaatcaggcagctctggaagagctccaaacccatattaacctctttataattaaattatttgtcctatggtccttgccgaaaaaaagcaaaggggcctcatgccatgtgtgatttttttttttttttttttttgagactgaatcttgctctgtcgcccaggctggagtgcagtggcacgatcttgggtcactgcaatctccgcctcccagattcaagcgattctcctgcctcagcctccagagtagctgggattacgggcatgtgccatcacgcccggctaatttttgtatttttagtagagacggggtttcaccaagttggtcaggctggtctcaaactcctgacctcaagtgatacacctgtctcggcctcccaaagtgctgaattacaggtgtgagccaccgcacccggccaccatgtgtgattttgaggggaaattctattgccccttccccatgctcagctattacctaaccctttcatgtgcctacagggattcatttctgcttcttgtgtctgctgttgtgctcagaaccaaacttccacccacgggggttcagggtcaaggacttggagttgcaggccttgttttatttactagctctccaattttgggcctcttactttacctctctaagcctcagtgttctcaactgtaaaatggggataaaaatagtacctacaggccaggcgcggtggctcacacctgtaatcccaccactttgagaggccaaggcaggtggattgcttgagctcaggagttcaagaccagcctgggcaatggtaaaatcccatctctatcaaaaatacaaaaaattagccaggtgtggtggttcacacctgtagtcctagctactcaggaggctgaggcaggaggatcaagtaaggctgggaggcagatgttgcagtgagctgagattgcaccactgcactccagcctggacaagagagagagactgtctccaaacaaacaaaaaaacaaaacaaaataaaaaaactacctacctcatagatagaacgaccacctaatttattgtccaaactgggacacttataaaaattcttcataattacatcaggagaaaggcatcattgggaataatcccacaaaaatctcagtgcgtggtgtcaccctccaaatggggacgttgtacagatgcaagcaggaaacgtagatacgttcctggaacagacggcaggagcatgtgggctgttcctggcttttcttgtctacacagaactttctactataattgtccccctctctttggcgtcattgttgtcttcctctctcctgggccatttcaccaacccataaacacgcattaatagctccctctttttttttttttgagatggagtcttgctctgttgcccaggctggagtgtagtggtgtgatcctagctcactgcaacctccgcctcctgggttcaagcagttctcctgcctcagtctcctgagtagctgggactacttagagcccaccaccacatctggctaattttttttgtatttttagtagagacagggtttcaccatattggtcaggctggtcttgaactcctgacctcgtgatctgcctgcctcagcctcccaaagtgctgggattacaggagtgagccaccgtgccccgcccagctccctctttaaaaataagaaaaacaatctcttcccagccctctcccctctctggccagtaccccatctttctgctcctctatagaaaaactcctccaaaactgcctatgtgctccagctccatttcccttctccaagggcttcttcttgactcagtgatagccgaagaccttccatggcctctacactctgcgcgacctgtcccctgctgatttctgtacctcctctcccactgcctccagacgacccactcttttcccatgttcctcagacacaccaagctcttcccaaactcgcggccttcgcattgaccgttccctctgcctggaacacctttccttatgtttttgcatgatcactcctttgctttcctcaggtcttggctctagccccttccctgcctggtttcttcctaatacttctgcatcctgaaattagatcatatgttatttggatgcagtgggatgtttggtctccctttctggaaggtaattttcagggtcagggacttgtttgctcacgactgtgtcctccaagaccagaacggtgcctggcatgtggtaggtgcccaaacagcacttcctgaatgaatgaaatgatacgtaattttatagtttacgattattcacagtatacactaacatcattagcaatagtgtatggagttaactggccaggatagccaagcacattggaggtttttttttgagttgactcctcctccccctaacctatcccttttgccagactgcatgtttcaggagggcagttgttccccgacctgggaggtgcttcagcccacagttttccagatgggctcattgcatttcctgggttccaagctcctcagatgtgattaccaccagcaggagcgccaacacagcccgcgagccctgcccgtccatcagggatgggaggcaggcagtccctgttgtccttcctctcaccctctgccctctcaggcttccactgagcattaatcacacagcctgaaggaatgcctgaagcaaagtccagttcagaggaggcccgctggcctgaaagaggaatggacgagaatacagggaaacctgccagcctccacccacaggcctggtctagctggctccaggttcatggagcccctctccagtctccaggaatgggtgctgcaagagctgagatcttagtccatcactctccggccaaaaaaggctgagttctggcaggtaaggctgctgctgaacagttaagataactatgcttcctgtacaccaccctgcatggcctgggtcctccgcaccttcccctctcaccatccagcattgaggtgcaccaggccagctggttgacctcttctctccccctagtacactgtgctccttgtcctgacccatttggggccttttaaggccccccattgtcgcagaacttcaggaataaagctggattgggcacccggtctgtctctttctggttctgtaattgaacaggctgtttaatccagggatcggcaaacatactctgccaagagctggacagtaagtcctttaggctttatggaccacatagtctcagtcatagctactcaactctgcccttgtagctcaaacacagccatggactatctataaaggagtgggtgttgctgtatgccaataaaactttattgacacgaacaggaggtgggccacatttagcccatggaccataggttgctgaccctgatttacccttctgacccagtttcctcacctataatatagggacaataatgccttaacatgaccactgagagttgatacaaacaaaagtacttacaactgcacaatcatgttgggtttttgtgttttatggcaatccctcaccttgcatccttgcccagaggagcggggcaggccccagcagtgcctcgctgagtgctgtggccaagcacatcactttgacttcgtggctgggagactgcgaacctcagactacctgcgttatgatttatttcagcgtgactagtatacatcttggttctgcagcgagtggagggaatgaggagggcctttcaagggaggcgggattgcattcgcacctgattacgctgcgcggacacaacagaggcgcccggacccgcagccctgccttcgccgcctttgctgggctgtttgcgcttcgtttccttctcgccgccccatggcgcgctttctctcttctttatttcgccggttctccccgctcctaacctgcttaacaacttacctcgctctcccgcttgctctccccccgccccccatctccactggttcccgagcttctcttcatgtccctaatggcgtggctgcgccagcatttaataaaagctgctgaccgggaaatccgagctaactgaattacttcctcattaaagaggcgggcagattcttgggccccgcgtgcagccaccctcgctgcctccctccccgccccgctccgccctgctggtcccgcctgccgtccgcaattaggcggcagatgcttgccgcccggtggtggcctgggttctgcagggactgagggggctcgtcggcttctctccagggtggatcccagctctgcttccttttccttccttctcagaccgtcagtttctcagccagggagctccaggccagctggagatcaggagaagagaggtggcctgctcaaggtcacccgagcctcctcctacccgagttccaacggagaccgctggctttggcctgggcaggggagctggtgattcctaagatcttcctttggcttcagagaagttggcttcctggcaaggcttccaggagattcccacaagccaactggagtcccccgagaaaaaggaaagaggggttggactccaaggatccatccggcgcctcctttccacctcccggctctgtgtctgtcaccggaccagggcctctgattccccgtgtgcccccattgggtcttccggggctgtgccagaggcctcctgtctggccagtaccccagggcgccacatccccaggccggcctgccggcctctcccctcggagttcccacctgcttctcttagcgagagcttcccgcgtcgagggctggctcagtgccaggcagctggtaagtgctttacaggtgttgttgcggagaaaaccagaaaccgttattttaaaagctggccatactctgagccttttactcgcaggcaatggaagatttactcgttcttttgtttaagaaaacaccttaatgggcctgttggcctctgggtaccgtctagatgggagaagattgagacaaagaaacattggcctgttctgcatcataaagtaaagggaagtttaggttccctaagctagggaggagtggaagggggcggggacagggaaaggaaccttgccaggcggataaagagggaagaaaacaggctggttacagcttagggagcctggatgctgcggtcaaacacagcctggaaaaaacaccttagaccctgaaactgccaccacccctacggaatcaggcgagacgctggccaaagctggatatcctacatcattgtaacccaagtttcttgtcttggaatgaagttcgtgcaagaagaagcccctttccgggacttggaatcctaaaccagtgccacttggtaactcttcactctgtctttgttctccagacctcccggtgaagtggttccggcctgtggttcttggagatccagctggtgctgctgtttgattataatgcagtagtttgaattcatggatgaatgtcctctgcattgtctcatgcgaaaggttcccagtaatcttgtttaggaaggactggtgaatgaattttgcttggaggaccccaggcttgggatgtggtagctactgccacagcctctactcttctggctatccagttaaggttaggccttcacaggagggggctgtgtgtctctgggacacctgttgacctaagtgctgtccctcctatggctggctgagaaaagacccagctttctgggggtctctctgtcagcacaaggcctggctcttcatccccgctgccacaccctcttccctggtgctgagacctgttgggagtttgggaaatcgtagccttggctgtttacccaggaaccttctctttttctcagtgggttgcaggagaacagaaagggaggtcaaagcgtgcttgcttgtgtctgcaggggaagactcgttcatgtagaggagtaaagcctaccccagtgccaactctgagacttgggaaaaatcaccgttttatcagagtttataccaaggcactatgaaattcacagatggctttgctctcctgtcttagtgtggttctctccaaaggagaccctgggacaaggacttggttgcaggtagcttatttggagagggataccaagaagctggggacccactcaggaatcatggagaacatgctttgagactgtccccctccaaaggatgggggagctgaagcctttatcctcagacttgccctgccttggcggagggttattaaattcacagtattgaattcccagcactttagggtgctcagtgcataggttgcacaggctgtgcaagctcttaaggcactggggaatgatcagaagcaaaacatcagagaaccccaggtgcttgaggtagaaggctgccagcacagacaggtacaggtgggaagattgcttgaacccaggaggttgaggctacaggtacaggtggacagagaggttatgaaaagtgtttgctataacccccaaccctaaaagccccagagcaaatttcagaaagaaattcaagtcctctagggctgctggtaggggtgcaaatgagttgggagagtgagttcctcatgccttccttatccacatagttccaaggtttccatcgtccaactacagtgtttcaacaaagagacatgctgggcgtggtggctcacgcctgcaattccagcactttgcgaggctgaggcgggcagatcacctgaggtcaggagttcaagaccagcctggccaacatggcataaccccgtccctactaaaaatacaaaaattagccaggcgtggtggtggtctcttgtaatcccagttatttgggaggctggagtgggtgaatcgctggaacccgggaggtggaggttgcagtgagccaagatcacaccattgcgctccagcctgggcaacatagcaagactccatctcaaaataaataaataaataaataaataaataaataaataaataaataaataaaaataaagtaaataaacaaagagacagtaaatgcctggagaatgaattaagacccatagttctgggtttttaatgggattgtcgaagagctagacccatgatgaatttaggaaaatttgggatagatatgacaaaagagtttatagccataatatataaagccgtgccatattcaataagaaagcaatcacaagctgacagagaaaacagtcaaattataccaacaggcagttcaccaaaaaatacatgcatattgccaataaataactaaaactatttctatctcatttgtaataaaacataatttcagacaaggtattattctttccccatcagattggcaaaaagtttacaagattgataccagccagggttggtgagggtgtggggagagagacattctcaggctgtccactcttttcagagacgagtttggcaatatgcattaaacatgaagggtgggcatgaaccttgaccagttccactgctaggcatgtaccccacagaaatatcagtatcaccatatatgcacaaagatgttacatacaaagaagttcctttcagttatactaacaaaattcgagccagtctaagtgtctatgagggatgtagttaaagtacagcacatccaggccaggcatggtggctcacacctgtaatcccagcactttgagaagccaaggcaagaggatcactttaagcccaggagtttgagatcagcctggacaatgtagtgagaccttctctatcaaaaaaaaaaaaaaaatcagccaggtgtggtggtgcacacttgtaggctcagctacttggaaggctgaggtgggaggattgcttgaacccaggaggttgaggctgcagtgaactgtgatcatgctactgcacaccagcctggatgacagagtaagaccctatctcaaaaataaataaataaatagcatgtacataccctggaatactatacagctattaaaaagaatgagagagacttgtcagaggtcctttaagtaatagaggaaggtctccgaacactattttattattctatttttgtaaaataaataactatatctacagtttgtatgtgtgtgcattgaaaatgatctggcaggttccacagcaaattgttaatgatggtgacctctagggaatgagatcagagtggggacaagcaggggaggtggtaggaggcagtggtgcagtgaagtggaatgtttttctatactcttacttggtttgttatctttatgatgagcaatttaatgaaaaccaatcaaatctgaaacacggggaataggtagaattgaaaaggattttagcaactctcagttcctgctttactttcctgggtcttcataggacaactccaggctcatttcataaatggaaagttgggcatcagagacatagtgtgaacccctgcccccctctagttacacagattctagggcccaggctgactgctttcaggctgatctctggaatggcttttaatgtataagtaagggagatgtatcagttagctattgctgtatgccaaacatcccaagtctcagtggcttaaaacaagcatttattattgatcatgcgtctacaggacaactggactgggttcgactgatctcatgtggaattactaaggcgtttgtgatcagctcgtgagctggcccatggtgggctggcccaggatctgggctttgacgccttggctccccttcaggtgcctctcgcatcactctagcaggctcgcctaggcatgttctcatagtgggagcataggtgtgtggtggaaatgcacaagcactttttcaagttgtgcttgagtcaaagttacgaccatggaccaaagcaacctcctggggagtgtgggaggtcatgacttcagggcctggatagagggaagccattcgcaaggccacaaacgcaatcagtctcctacaaagaccagctcaggacctgcagcagtcagaagggattggaggtgtcccctccccaaagctttggaagccttgctgccagagtccaagttctgagtcggtgctggtcactgcagcctggggataaagaagcccagtctttccgctgcaggaatggcccccacgggaaggcaagccatctccagctgtgattagttggagatcagcagtatccagccagcctcccaatctcacctggggtcccggcgacggggggcctgaggatgaaaggatggtgggtagtgggcaagggaggagggaggagttaaataaaacaccagagcaagccccagaggtgtgaatttgcccttggtcttcatctaacagggctgtctgcctcccctccttttttctcccatgtcctccacccacacctgcctctgaatgtggtgagccaggaactgattgcacagaaacttctcatttttagttttacctcaggtggttgcaaatctccttcctgctcagagatggggactgagcctgccccttggcatcctggtcctgctgcctgccccctccgtggccccagccccagcccccagcctggaccccatgctcctcctcagcactctgtcactgacagcgccttcgcaggctacagggactctggtgtggagtgatagattctgccttttcctgctttcaggaaatattgccattcgcttcgcatttatcctgcccctcatcaccacatggaggccgaggctgaggcgggctcgtagtcatctattatctgcctctgttggaggaggaggacaggcttgcaccgggagtgccaggaggtgggctggggctggggagatggagctctcattcaataagccacaaatatttattgggagtcggctgtgcacatagaagtgcaggtactgaaaggagagagaaaaacggtgccacagggccaggggacacaccctcctaccagactcacaatggggcaagagaggtgggacattagctgttagaggctgaaaccgcaaacacccctgtggaagtaacagtacaagagtgctagagggtgatttgaaatcaggtataaaaagctttccatatgcatgccctttgatccagcagttccacatctagaaattattctaaatgtgtacagagatgcgtgtacaaggtttatcagagcattatttatagcagagaaaagcaactgggaaacaagttctgcaacttatggtacatccatataatgaaatgccatgccaacattcaaatgcatgtggtagaaaaatatttatcttcaagacaaggtctcgctctgtcaccaaggttgaagtgcagtggtgtgatcatagctcactgcagcctcagcctccctgggctcaggtgatcctcccacttaagaaaaataattattggtatacagaaaaagcttgtgaaccatcatcaagagataacttctataatattggtgtgtataattctggccatttttatacatacacttatttattcacaaatgagatagtagtaattattctattgccttcctcatcccctcttcctaaaaggtctagggaagtttattaaaaaactaaatgggatcattgagagtaggggctgagagagctgtgaaccctgctggtcccaagagcatccacgttgtcacacagacctctaacaaacgatgtttatcacaagcaccttggagccaagcatctcttaggaaggcagccgaatgtgtgagtaatttagaaagatttccattcaaaaggaccccacaaaagtcgtgacagtaagagaatggagataggtgttactgaaactttaaatggttggacaaacaagggcatgtcctgatgttccagatgaatatctgtgcacctgagtataatcagcatctctcaccttcctatgagaatcgattttgttcacccctgtccctaggctgcggataccaaaggcaaagtccccaaatattctctgcctgccaggaatctcaaaccctttgaagggaaagcttgatggtgttaggaacgtagaggttttccagagaagggtctgttttggcaatgatggggtcagtgctaaacagtgagtccaagatggctgaatgagagcaggtgttctgacttcaggtgtgggctgcaatgatgactaaggagtttctggaagatccgtctggaccttgaaggttgagagaggtttcagcaggtaggtagggaaagatcagcaagacaagcaactgaggcttagagaggtggcctgacttatgccacaccagccagcttaagagggagccttgaacttgggcggtgctctggcttctgcagagccaggtgtacctcagaaggaccgagcctgaggaggggaggtgggagacagcctctcagctccactctgatgaaatgtcttgaacgtagttatcccgtgcagagtgtaatggagggaagtcctgcgctccgtgctgctcatttgcatgtgtaaatgcatgtgtatatatattgcttattaatgtcagtggaatttgcattttaagtggattgccttgttgggcatgttctttagagccctggacttgagcagaattttccaacttgaaagttgctgttccctgcgcaataagcaattgggctctttctcaggggccaaaaaaagggggatagatggttgtggtgtagaagaaggaaaggggcagtgaatagggtgtccagacaacagtgaccagtgactctgggcaggcagcagcttctctgtgccccaatctcctcatctgcactgtctcccctgcttacctcaccgggttgacttagaatcctgggaagatcattgtcacagtgggtagaaaagtggaagactctacagctataggggtgattatcattcccacagcccaaatagcagccattggtgcattctctgctgccagtgttcatatgtgctatctgtctccgcacctccacctggacacagaacctggcacatcttcgagtctttcctgctccccagacaactttaatcatcagcctggacttctctagagaggagagaatggggttgtcttgaagacacaagaacgaaaacatccacactggacattctgttctccaaatcccatgtgtcaggcccctttctccactcagcagctgtcccagtggtctctgctctggaaatgtcaattgcctcaactcctatgtgttgaacaatttgactacactccagcttttatgcccacatttgcaacccatcaggatgctgggcaaacaaaagggcctccagttcatcagacgccccatccagggaagggagttgggaccacagacctcaatttgcccattatttcaacaccagggcacttcacttcagcagtggaatgttgccttgtttcccaactcattagctcatctgctcgttgtcccctgatttgatgacaagaatctggcttcctgagcatctgagggcatatcacggctgtcatcacagaagtgacagtgactatgggcttgagtcaaccatgcttgtctgggcccagctgcagccccagagaacaaagaacactggtactaagggtaaccaggaggtgggagagggcagagagatgggggacagttagcttcgctaccagtctgtctgaagggtataaataagtggatacaagacacaaatctcacatgctgaagaatttcaaatcattgactttgttactccacccttatggagtagagaacagctcttcactccttaagtgtgggctgtgcatagtgatcttctttcaagagtatagtatggaaaggcagaaagaaaagagaagttttccagggtagaaacccagcatgactacctgtatgcacccttgataggatgtgataagaagattatgatcctgtgattaacttgggtgatatgttttggaggggaagatcactttacctctgtggtcttcccctccaaaacatacccaatctgattataggaaaaacatcagacaaaccccaactgaggaacgttctacaaaataactgaccagcatgccccaaaactgtcaaggtcatcaaaccccctcaaaaaagcctgactcataggcaggaggaggccagggagacgtgactaccaagtgcaatgtggtttcctggatgggatcctggaacagaaaaaaaaaaaaactacagaaatcagaataaagtatagactttggttaataataatgtattaatattggttcattatttgtgacaaatgtaccgtactcatttaaggtgttaataatagggaaataatagaggaagcagagtgaggaaaaaggaactctctgtacgatccttgggataattctgtaaacctaaaactgttctaaaatgaaacatctgtgaaaaaaaaacttggcaaacaatcaggatttgttactatattcaaacctcttcaactaaacaaagtggctgttttgttttaggttttctgcaccatcgtttctcactgatgttggcatcatcagactgtcaaaggctaaacagcacctttaagatgcctggcagcaagtccatccagcccaggagaaaatggtccaggccagggacatgctatttgtcagagaaaattacttggattgctccccactcctcatcccagggtgtgccccaccttctgatactgaaaagactcatctggggtatctacactctgcaattattgtgtagtcctaggtagtgtgcttatctccatcaggattcagtatctccagctatcagacaagcttggaagagcacagtcctcataggagagtgcagcaagcattaaacacagaatcaatcttactatactcacaaaacggattgcctaattcaggtgccacagacgtggaagctcccattagccccaactgtggatcttgtttgtctcaaaaccccagtatatcctcaggagccagaagaatatctgatgcatagtagatgctcaataaatcaatggttattctgtgctgggtcctgtgcttgtcatcattcactctagatgtcttcaatagcccctgacacatgccaccttcctccatgccacatcaaaagtcacatgtaatatgcaaacattaaatgttgatgattgaaacaccctcatcccataaacagtcctgccccaccccccacctcttacataacagatgagagtggacccctcccatcaagctgctcctctgtgactatgctcctttgctcaggactgggatgagggagatgactaatgtgtgacgccaacatgtcacgccacacaccgggaaatactaacgcataggcttccattccagcagtatggtgagttagatactttcacattccttttgaaacaactaaaattattgggggaaatttttttaaataccactttggaaatgcccatgtggcacatgaggaagggctccacagaacccccaaagtggaacagaaagtagccaagccaacttttaccctgagaatttctactgaaacttggagaacttggcttcaattcctccctccctccctctctccctttcttccctccctccctctttccttcttcccttcctccctttccttcctcccttccttcctctctccttcctttctttccttttctttctttcctttctctttctttttctttctttcacttttctttctctttctttcctcccttccctttcattccttccttctctttctttctctttctcttctcttctcctttcctttccttctttctttccttcctcccttccccttccttccttccttcctgtcttcagagtctcactctattgcccaggctggcgttcagtggtgtgattttggctcattgcaacctccacctcccaggctcaagtgatcctcccacctcagtctcctaagtggctgggacagaagctgactgcctgccactatgctcagctaatttttctattttttgtagagatagggttttgctatgttttcccggctgatcttgaactcctgggctcaagcaatccacccatcttggcctcccaaagtgctaggattacaggtacacaccaccatgcctggctaattttgtatttttttttagagatgggtttcactgtgttgcccaggctggtcatgaactcctgggctcaagcaatccaccctcctcagcctctcaaagtgctaggattacagacgtggccactgtcctggcctcagacttctgttttgatggttgtctaaaacagggcaacaagagaaatatcctcaatctaatagaagcacacatcaatctgggaccacagagagtattcatcaggtaaggatgagcaggcaatacacctgccacgtagaaaaaggtgaaggggaaacttgcttgacttgttcaaccttggcatttggggagggaggaaaacaaacttacttgagactgtgtaatcatgagccaatcttcacaagggtctatggtcatcattttagctacctgtagtccaaaaaacctcaagggggaaattaaacaagttgtcctagtttggtagaccatggcagaaaccaatgcaaatcccctctgggaaactctgcttccacatgacttacagaatacttacaaaattctaagaaatatggtggcccaaagtcaaaggtccccagaaattatcctgttaggactccaggaagacagaatttaaaaaaaggaaaaagagaatgagaaggtctagcatatgtttaatcaaaattccagaaggagatgatacaagaaaatgagaaaaagatagtattcaaaaagataatagctgagaactttcaaaatatttttgtaagacacacatttttatatccaggaagctctggtggtatctgatgctattcctggatgggaggattggtgccttgaaaaaatgtttggcacttctactttctacttcttcttcttagtttgtagaaagttgccaaaaaaaaaaaaaaaaagttgctctcctcctatcaagaaaaagctggataaattacagaataccaactcttcctggacccatcagagagatgaagtcacaaggtaactaagtagcctggaatccacaaaggagcaaggccctccaaggagagaagagatgcatgaatgacctacctccctcgtggcagaacaagggaggaggaggttctgcagcctaagtggcaaggagagtcagctacaattttaaagaaccgctgaaggccccgtgtgcactagtgtatcagtctgaaatagatgcaagcatctgctaaaacaggaattcctgtttactcacaggatatttcccacgagcctctgacgggtgctctgagaaagatttgggccggcaggacacctgagagagccaccatttgcagcgcagaccagcagaaggtgatcagctgccaccgtgaaggagacagaaaactctgccatttccctagagcttcctctcatatgaagcaaaagccttaaaccactagaggaggaagtgcaaacccttttgcccactgggcacaaagttagtgatcagtggctataggggtggagagagcaggtgcaacaccctgtccagacccttctctcctacaaagcaaaagccataaatcacttgaagagggagagcaaagcctcttgcacccaggcaaagacacaacgtggttaatgaaaagatgtaacaaaaactccaatgctgggtgatgagcaggtaactgtcttgggctcaagggcccatgttgatattaagtagacgtctcttaccactggaggaagagcaggaaacgcctgtctaagacccaccaaagcagtttgactactgaaggaagagaccacatggggcaacagtgctggaaaggctttacccccaaagctcaggtacacagagtctccctgagactaaagctggacaaggcaacagagaaccttcctgccccctccacaagcctatcagggagtacccagaaacagcagtctactgctggggaaggacaaagcatggagagagatctactttgtgacacaggcattgaaagactgggtgagttgagggtggaccactcacactgtgaaaaccctccagcacgccagccttgaccctaaatataggcaacagcagcacactgatcggaaacctggaagcctgcggtccaataatggtaaccatagcaacagcaaaatccaaatccagctcaacctgtagctagcatgactcacccctccacctaatgacccaaaacaagaagcatgcccacttccaggcatgcatatgatctatcttttgctaaccagttttagtgtgatatttgacattcaatcaaaaattatgagacattaaaaaagggcaagaaaacgcaaattatttaaaagagataaaacaaccaaaaaaataagactcagatatgatcttcatgttagaactatcagacaagtactttaaaataattatgattaaagtgctaaaggagctagtgaaaaagtgggcggcatgcatgaatggatgtagaatttcagctaagagaaagaaattgtaagaaagagtaaactgggaatacaagaaacaagaaaaaagacaaaatcagagaaaaaaatttcctttgatgggctcattagtacacccaagacagcaaaatatgtcaatagaaattacacaaactgaaaaagaaaaaggaaaggggagagaactggattagaatatatatgagctaaagacatacacaatggcctaatatatatataattggagtcccagtgaaaatgattttcaaaaatcaagaaaaactgaagacttttacagacaaaggccaaaagaatttattactaacaggtctgtactgttaaaggaagttcttgaggcccagagaatatgataccacacagaaactataccaaaaaaaaacaccttcaaaaatggtaaaaataaaggtaaatacaaaaatattattttctcatttttagttactctaaaaatagttgtcttgttaagcaaaaaaaagttatattttggagatattttggggtttataatgtggaaaataaaatgtgtatcatcgatagcacaagcataggtggaagaaattgaaagtatatagttcttatataatatagtgacttagtataaaactatttgaaggtagactgtgatatattaaacatgttaaaaactctgggacaacaactgatagttttatttatttttattttttgttgatatggggtctcactatgttgcacaggctggtctctaagctcctggctttaagtgatcctcctccctcagtctcccaaagcgctaggattacaggcatgagccaccacacctggctcagacttttcttaaaaaagtataataagccaataatggagataaaattgaatcataaaaattagtcacaaatcaggcagaaaaatagaaaaaaaagaagagatgagactaaatagaaaatatttagcagtataggaaaattaaataaaaccatatcagttataacactaaatttaaataattaaaatgtcccaattaaaagacaaagattgtcagactgcataaaaaagcaagactcaactatgtgctatatccaagaaacagaattttaatataaagacataactggttaaaagtaaaatgatggaaaaggatacactcatgcaaaccatgcaaatattaattgaaataactagagtagctacattaaaagtagtaaaggtagacttcagatcaggaaatatgaccgaaattaaagaggggcattgcataatgattaaggatcaattcatcaaaatgaaataatttaaaggtatatgcacctaacagcagtgcttcacaacatataaagcaattactgtcagagctgaaaataagtaaatacatccacgaatagagttagaatgtcaacattcctctcttattaattgattgaattagtaaacagaaaatcagtaaggacatagaagacctgaatgacattatcgaccaatttactctgacattttatagaacaacccaatcaacaacagcccgtgacacattcttttcaagtgcatgtggatcattccatagaatagaccatattcttgccacaaaacacattttaaaacaccgaaattatacaaagtatgttttctaaccacaactcaattagaaatcactaagagacagatatatgagcactcaacaaatatttgaaatgaaataatacacttctagtgagttgaagaggaagacacagggaaattttaaaatatgtttgaactgagtaaaaataaaggcaacatattagaatttgtgtgatgcagctaatagagtgtttggggaaatttataacattatatacctgtattagaaaaaaataagtgtctctgatcaattacctaagttttggctttaaaaacctataaaaggaagagcaatttaaatccaaagaaagcacaaggaaagaaataataaagataagagcagaaaccaataaaattgaaagaaaaaattgataaaaattaacaaaatgaaatactggctttctgtaaaggtcaatcaaattgataaacctctagtcagactgataagaaatcaaaagggaaagacagaaattaccaatgatgggaaaaaagaggagagctatcactccagagcctacaaatactgaacggatataaagaaaatactatagacaactatatgccaatacatttagtgacttagattaaatggacacttttcctcaaatatagaaactatcaaagcttattcaaaaagcaatagataagttgaatagtcctacatatattaaagatattaaatttataattaaaaactgcacactgtatgtagtcaaaaaccttcccacaaagaaaactgtatgcccagatggcttcatgtgctccatggcaagtttttccaacatttaatgaagaaataatgtaaacactacatcaacacttccagaaaacagaaaggaagtgaacacctcctaacttaagatgagaacagtatcacactgatactaaaaccaaacacattacaaaaaaaatacacagaaaactataaacacagaccaatacccttaatgaagaaaggtgcaaaaaatccttaacaaaatatttaaaaaataaattcagcagtatatgaaatgacagtacatcatgaccaagttaggagtttatcgtgggaatgcaaggttggtccagcctgggtgacagtgggtaaccctgtctcaaaaataaaaagaaaaagaaaaaaaagagaaaagaaaaaaaatgaaattttgaaagttttttaaagtaccacttacaatattaccaaaaccaataaaatacatgtataagatttatatgctgaaaactacaaagcacggataggagaatcaaagatctaaataaatacatgatgatatataggatgtgtcaagatgtaaatttccccaaaattgatctataaatttgctacaatcaaaactcagcagacttctttataaaagtcaacaagcttatttaaaaaattcatttagaaaagtaaaggaactagaattgccgaaacaattctgaaaaagaacaaatttggaggcttatattatttgatttcaaaacatactatatatctacactaataaagacagtgtggtaataatgaaaacatatccagaaacagggccataaaaatatggttaactgattttcaacaaaagtgccgaggtaattcaatggagtatggattatttttcaccaaatagtactagaataatttgacatctatgtgcaaaacaaagtctttgacacataccttacacaatatacaaaaaataatttgaaatggatcatagacaatgtgagctctaaaatgataaacctctagaagaacacataggagaaaatctttgtaaacttgtttttattttggaaagaaaacaaaaagcacaaaccacaatgaaaaaaattaacaaattagatttcattaaaatctcaaaattctgccttttggaaaggcatgtttaaaacataaaaggaacgagccatataggaagagaaaatatttgaaaaatacatgtctgataagactgtaaccagaatacattttgatctctcagaactcaattataagaaaataacctaattttaaaaacgttttaaacttgttaaaagatttgaacatatatttcatgaaaaaagatatactgatatggtttgcctgtgtcctcacccaaatctcatcttgaattcccttgtgttgtgacagggacctggtgagaggtaactgaatcatgggggtaggtctttcttgtgctagtgaataagtctcatgagatctgatggttttaaaaaggggagtttccctgaacaagctctctctgcctgctgccatccatgtaagacgttacttgctcctccttgccttctgccatgattgtgaggcttcccaagccacgtggaactataagtccattaaaacctcttttcttcccaggctcaagtatgtctttatcagccgcatgaaaatggactaatacttatatacatatggcaaataagcacataaaaatatgctcaaaatcattaatactagagaaatgtaacttaaaagccaattagatatccatgcatacctattagaatggctaaaaaacaaaacaaaaataaaactttgacaataccaaatgctggcagggatgtggagccactggaatccgtatacactgctagtgggaatgaaaaatggtacagccactttggaaaacagtttggcattttcttataaagttaaacatatgctgactgtatgtggtaggctgaaaaatggccccctaaaaggatatgtccacatgctaatccccagaacctgtgaatatgaccttatacggcaaatgggtgagtatgatcttatatggcaagagatgtaattaagttaaggaccttgaaaatagttaattctggattatcccagtgggccctaagttcaatcacatgtatcgtcataagagagaggtagagggcccgggtgtggtggctcatgcctgtaatcccagcactttgggaggacaaagtgggctgatcacttgaccccaggagtttgagactagcctgggcaacatagtgggacccgatctctacaaaaaaatacaaaaattagcccggcatggtggtcccagctactcaggaggctaaggcaggaggatcacttgagcccaggaggtcaaggctgcagtcagccgtgattgcaccactacattcgagcctcagcaacagagtgagaccctgtctcaccaaaaaaaaaaaaaaaaaaaaggagaaagacacgcagagggagtctgggacagagacagatgcacagggagaaggccatgtggagatggaggcagagattgaaattacgcagctgcaagtcaaggaacatcaaagttcgaccacagccacccacaggtgggagagagtcatggaacagattctcctcttagagcctctgaggtactgcagccaagctgatgccttgattttgaacatctggcttcccagaactgtgagagaatacactgcagtcgtttgaagcaccaagtttgtggtcatttgttatggcagcttttgggaacgaacgcacgagataaccagaaaatctccctcacacatatttacccaagaggaatcaattcatatatccaaacaaaacccttacatgaatgtttagaatgactttattcataattgtcccatactggaaacaaccaatatgcccatcaactggtaagtaaacaaattacgattcacctattcaaaggaatactacacattgattaaaacaaaacaaaaaacaatgatacatgcagcaacatggactctcaaaagcaccacgttaagtaaaataagtcagaatcaaaaagctccatgccacatggtcttatttatgtgacattatggaaaaggcaaaaatgtagaaataggagacagataagtggtcaccagaagcaagggatgtggggaaggaactgattatcaaggagcatgaggaaactttttagggtgaggcaatggtctatgttttgatggtgatggttaaatgactgtctggatttatcaaaattaatagaactgtatacctacaaggaatacagtttactgtatataaattatgcctcaattagcttgaaaaaatgtacgaaatgccaaagcaaaagaaattatcctaaaagcatcaagagtgagaagacagaaaacttacaaagaaacagtcattaggctggtggctcacttttccacagcaacattggaagccagaagaccatagaataatttagcttcaatatcctgaaataaaattactgccaacctaccattcaatattccatgtaatcagtcagagtctgtcagcaaaacaaaaataagtctaaatattttaagcaaaaaaaaaaaaagaaagaattaacataggaaattaggtgcttgcaaaattgttggaagcactggaggagtgagactcagatgttgcaggtgataaactcagaaatcagaagcaagaagctgcaggggaggccccaaagctggaggcagagtggaccatgaagtctgtgcatgctcttggaaactgccatcactgctgatgcgtccactggcactgccagaggaaggtttactgccaacttcttcatgccttccaaatctcaagcaactagaatgctgatggcagggaattctgaaattaggggagtgaaactacagcagtagttagaaaagattatagcaaataactttggagatgcgatcagaatagccttatgtgattcagaagaaatggaaaggtattggttaactttaagccttattaaaccaagtatgcatacaaaataactagaataactccgaaattagatgggcatagagtacataatcccgaaatagatgggaaaaatggaataataattaaaaaaaaagaaattaaaaagtcattctaaaagaaagagaaatacaaaaatccagatgaaaagcatattaaagggatagaaattaatctaaatgcaggttgggtgtctataatctgaaaattcaaaatctgcgatgttccaaaatccaaaactttttgaacacttatatgatgccacaaactctacacccaacctcatgtaatgagtcgcagtcaaaactttggtttcatgcacaaaattatttaaaatactgtaaaaaattaccttcaggctataggtataagatgtacataaaacaaatgaatttcatgtttggaattgggtcccatcctcaatatatttcattatgtatatgcatatattccaaaatcacttctggcttcaagtattttgggtaggggatattcaacctatatgcagtattcataataaataagaatgaattcaatttttgaattaaaagcccaagattatcagactattttctttaatctagcgaaatgtggcttagacaagacagaaaaaacatgaagtttgaaggtcaaacataaaagttaagtttaaaaagggaggaagatttaacaagaaaatactgaacaaaagaattctggtgaagttatattgatataagataaaacagacttttagactaaaagtattactaaaaacattgggactttctacataatgataaaatgtttaatcaaaaaaatgtaataattctaaactttcatgcaccagaaccaaaatgcaaaatatgtaaagtaaaaattgacaatactacaggaagaaatagaaaagcacaatcataagtgagagatttttatttatttatttatttttatttttggttttttcagacaaagtctcactctgtcaccctgactggagcacaatggcgtgatctcagctcactgcgacctccgcctcccaggctcaagcgattctcacacctcagcctcccaagtagctgggattacaggtgtgcaccaccacacactcagttttttttttttttttgtatttttagtagagatatggtttcaccatgttggccaggctggtctcaaactccccacctcaggtgatctgcccacctcggcctcccaaagtgcaaggattacaggcatgagccacagcaccaagccaacatagagatttttaattcatccatctcagtgattgatcaagcagacaaaaaaattactaagaatattaaaaatgtggacagtacaaatcagaaagctcttatggtcatatatagaatactgtgcccaacaatagaagaatatacatttgtttcaaagcatacatgaaatagttacaaaaattgactatgtgcttgaccacagagttagcctcaacaattatatcatattatctagctctaatgcactcaagtaagaaatttaataataaaaatatacccattaaaaatctatgtctggaaagtttacaatatctaagtactgatggctttaaaaaggagttataatgaaaatttgaaaatagaaatatgaataactgaattataaaattatttcatataaaaattttgggggtgcagctaaagcagtatttagaggaaaatatataactttagctgcttatattagaactaaaggctcaaaattagtgacttgagcattccatttaaaaagtcaaaagaatagcagaataaacccaataaaaacagaaagaagaaaatattcaagctaagaacaaaactaaaggcaaaaataaagttcaataaaaagaaatgtcaaaaccaaaaattggttctttggaaaaaaaaaaaaaaagcttttaaaatgaccattccttagctagcaagattactcagaagaaaataaacaggatggggagtggagagagaaagaatgaaaaaataaacaatattaggaacaatattaagaattaaaaagggcttattactgcaaaagctgcaattattaaacagatgagacgaggttaagaaaaactttatgataaattttaaaacttagataaaagtggataaattctagaaaaatacaatttatcaaagaagcagtagaaaacctggagagtctaatgacctttaaagaaattgaattattagataaaaatcttccagaaaaaaaaaaaaactaggtccaaatgatttatcagcaatttctacaaaatgttttaggaactacttttccaggtcatagaaaaagaagaaacctgcccccatcagtttaaaagattagcaaaatcttaattccaaaacttgacaaggatgatatgggcaagaaaaatcagtctaatctcatgcaaaaactgcttagtaaggatagaattgatcattttgcagtaacaaatttcaaaatgtcagtggtcttgcactatggaggtctggttctcttccatgtcacagcctgttgcaggacaggcagctccgctccaggcagtaacacaggaacccaggctgcttctcttttatggctataccgcctagaacatgcggcttccaaagtttccacaaaaggggaagtgcaggctggaaaatcgtgggatgattttaaggtccatgcagagaagtgactacaccattgttgaggattgacttgtgtcctccaaaattcaattattgaagtcctaaccccgagtacctcagaatgtgactgaatttggagatagggtctcatgatgttttaaattatttaattaccacttttaacagggtctcactatgtttcccagactggtgtcaaactactgggctcaagcagtcctcccacctcagcctcctgaagtgctgggattacaagcacgagccaccccacccagcccataaaatattttttatttgtgacttttacatctctgttcatgtggcagaaaccgcacaatgtgcttagcccaccacttccttttcctggacataaagaagtggtaattaaaataagttcataggggtgggtgctaatccgatatggcgggtgtccttataagaagagattaggacacagctgttcatgcatagaggaaagaccatatgaagacacagcaagaggtcggtcatctgacagccaaggagaggagcctcagaagaaaccaaatctgctgaccctctgatcctggacttccagcttccagaactgtgagaaaattaacacctattgtttaagctattctgtctgtggtattttgttagggaagccctggcaaactaatccaattatcattcccttagtaggaactcagtcacatggtcccaatctaactgcaaaggaggctggcagatttgctcttctttatgtccaggacaaggaaatggtgggctaagcacattgtgtggtttctgccacatgaacaaatatgtaaaagtcatgaacaaaaaatcttttatgggctgggtggagtggctcatacctgtaatcccagcacttcaggaggctaaggtgggaggattgcttgagcccagtagttcgagaccagtctgggaaacatagtgagaccctgttttacaaaaaataaaaaaattagccgggctttgtggcacatgcctgtagtcccagctactcaggaggctgaggagggaggattgcttggccccaggatgtcaaggctgcagtgagcagtgatcacgtcactgtactccagcctagatgacatagtgagaccctgtctcaaaaaaaaaaaaaaaaaaaaaaaattcatgaacccattagaaataaacccaacagaaaaatgagcaaaaacataaataggcatttgctagaaaagaaagcaaaatggcccttcaccatatgaaaagctgtggctcccggctgctactccaagcgtggcctgcttagatcacagtggtatcctttgggacatgtctgtaataaggaaaatgaaaagcaaaatcctacagagataccatctcatacttaccaggttggtaaaatgtaaaagtttgtcaataccaagagatgatgaaatgtgggccaacagaaactctggtccttcactagggtagagtgggaatgggcataaccattttggaaaacagtttgcctgttcattgtaagatttaatgcatggttaccttaggatcaacaactctacttctcagtgtaaacctaggtacatagagcagtgcttatcaaactctagcatgcatacaattttgctaatatgcaaattctaattcagtagatctgggataggaccctgaaaatctgccactgttctgagggctacacttggagtagcaaaccttgagtttcataaatccatattcacagcaatattcataatagctcaaaccccaaatttccaccagcagtaggctgggcaaataaattgcagcatattcatacactggagtattatttagaagtgagaatgaatgaaccacaaacactcacattaaaaatagatgaatccaacaaatatattcttgagcaaaagaagcaaggcacagaagaaaatatacagtatgactccattatataaagttcaaaactcaggcagagctaaataatacccaggcacacctaattttagtgtgcttcacaaatattgcatttaaaaaaaaaaattaaaggtttctggcaaccccgtgtcaagcgagtctatcagcatcatttttccaacagcatgtgcccactttgtgtcttgttgttatattctgataattttcacaatatttcaaaccttttcatcattatatctgttatggtgatctgtgatcaataatcttcaaagtcaccattgtaattgttttgtggtgccacaaactgtgcccataaaagatggcaaacctcatcaataaatgtgtgtattctgcgtcctccaccgaggagctggtccctcatctctctccttctcctcgggttcccttattccctgagacacaaaaatattgaaattaggtcaattagtaaccctaggtgttagggcaattaataatccaagtgttcaagtgaaaggaagagctgtacctctcccattttaagtcaaaagctagaaatgattaagcttagtgaggaaggcctgtcaaaagctgagacaggtcaaaagccaggcctcttgcatcaaacagccaagttgtgaatgcaaaggaaaaattcttgaaggaaattaaaagggctactccagtgaacatactagtgataagaaagtgaaatgcagcactattcacaatagcaaagacatagaatcaacctaggtgtccatgaacgctggattggataaagaaaatgtggttcatatattccatggaataccatgtggtcataaaaaaaaggaacgaagtcatgtcctttgcagcaacatgaatgtagctggaggccattatcctaagtgaacagaaagagaaaatcaaatactgcatgttctcacttttaagtgggggctgaacattgcatatgcagggacataaagatggaaacaatggacactgggcactccaagaagaaggagagagggacgggggtaaaggctgaaaaactccctctcaagcactatgctcactaactgagtggtgggttcagttgtaccccaaacctcagcatcatgcaatatacccttgtaacaaaacctgtacatttaacctctgagtctaaaataaaagttgagaaaaaaaaaaaaaaggaaaatagacttattgctggtatggagaaagtttgagtggtctggatagatgatcaaaccagccacaacattcccttaagccaaagcctaatacagagcaaagccctagccttcaattctataatgactgagggaggtcaagaagctgcagaagaaaagtttgaagctagcagaggtgggtttaaggaaagaagccatctccataacctaaaagtgcaaggtgaagcagcaagtgctgatggagaagatgcagcaagttacccaaaagatctagcttcataattgacaaaggtggctccactaaacaacagattttcaatgtagaggaaacagccttctattggaagaagatgccatctaggcttttcttagctggagaagagaagtcaatacctggcttcaaaacatcaaaggacaggctgctctcttgttagaagctaagtagctgatgactttaagttaaagctaatgctcactgacctttctaaaaacctatgggttcataagaattatgcagaatctactctgcctttgctctgtaagtgaaaccagaaagccttttgacagcacctctgtttacagtatggtttactgaatattttaagcatactgttgagacctactgctcaggaaaaaaagattctttcaaaatattactgctcattgacaatgcacttggtcacccaagagctctgattaacatgcacaaaattaatgttgtcttcatgcctgctaacacaacatccattctgcagcccatggatctaaaagtaattttgatgttcaagtcctactatttaagaaatacatttcataaagttatagttgccataagtagtgatgagcaacgtgaattgaaaactttctggaaaggattcaccatcttttcatctagagactctgtcttctagatgccatttgaacatttgagatttatggtaggaggtcaaaatatcaacactaacaggagcttggaagaagtggagtccaacctgatgttgaggggtctaagatctcagtggagaaagtaacagcagatgcagtagaaatagcaagagagctagaattagaagtagagcctgaagatgtgactgaaatgctgcaattcatgataaaacttgaacagatgaggagatgcttcttacagatgagcaaagaaaatggtttcttgagatgggatctactcctggtgaagatgctgtgaacattgttgaattaacaacagaggatttaaaacattacataaactttattgataaagcagaggcagggtttgagagaactgactgcagttttaaaagaaggtccactgtgggtaaaaagccatcaaatagcatctcatgctgcagggaaatctttcatgaacggaagagtcactggatgcagcatacttgattgctgtcatattataagatattgctgctgggcatggtggctcacacctgtaatcccagtgctttgcgtgaacaacatgggaggaatgcttgagcccaggagtttgagaccagcctgggaaacatagcaagaccccatctgtacaaaattttttttaaaattagatgagcataatggcatgtgcctgtagtcccagatactcagaggctcaggtgggagaataacttaagcctcggagttcaaggctgtagtgagctatgattgtgccactgcactccagcctgggtgatacactgagactctgtcttcaaaaaaataaaaaagaaattgctacagccaccccaacccttggaaaccaccacccttggatgatgatgtgagcagccatcagcatcaaagcaagaccctctgccagaaaaatgattgacttgctaataatcagaggattgttagcatttgttagcaagaaagtattttaaaattaaggtatgtacattgtttttaagacataatgctattgcacattcaatagattccaatatcgtgtaaacgtaacttttatatgcaatgggaaaccaaaaattttgtgtgattcactttaatgtgatattcactttattgtggtagtctggaacaaaacccacaatacctatgaggtaggcctatattgtttaggaatatttatataccttgtaaaactttgtgaaaaaaagagagagagagagaaggaagaaaatgcttaatatgaagctcaagacagaagttacctctggtggagggaaagaggaaggtgataggaaataaatacctaggggccttctcaggagctgctaatgctctatttctcaagctgaatggtgaatacgtgggtgttttattattactctttaagcagtgtatatatacattacactcttttgaataaaaaagtaacaggaagcctttttgtatttaagtccccagtgactagtaaaataaatctagtgggttatgaaaagtctaaattttgagaatcaaggagtacttgcacctctgaaataaagcatgcagacatctcagtttgcaagtcatgccatattggacacccaggaaataagatccgggacacgcaccctctttccatctaagactcccagcgacagacaaggagacaggagggggcaggactgcagagtaagtacagaaagctaactgcatccacgtgttgacatggggcagagtgggccagtgcagaggatgcgggtgggtaacttcctggaacagcaggagagaagagaaaaggaacagggggaagggctggagacacatcatctcccatgtcatcagtttgggaagctctttggaaaagcccacgtttactttctgaaacctcatcaaacctttcttctactacctttaaaagaataccccacctactggctgtgggagccacagccaggcagctttaactcttgagacactcaagattctgcggtctggggcacagatcccccgattccaaagcctgtccctcccagacaggtgtggtacctgggccagacttctcccacttccatgctagggagctccttttttgcagcagctctgcttgcaacttccaccccatgtaagggtgatgatgagattggatttcaactgagagagaagcaagttataaatacatcctggtgtactattaatgtcaataatattagtacaattatttccagactagtcagattcaataaaagcaacagtaaacaagcctgaggcagccaccaggtgagcgctgtgggggctgcacagctggctggctgctgaggacgatgctttgcctttctggctgtctcttgagcaggggaagccatggtgtttggctgcagttctgccagcgcctgctcacacacccccaggtcctgatgcctttaagtaactgagcaaagcagccatctccattcgtagcaacaactgtgccacatgtgaaagaaggagagagtttgagcactataggctactcacaggcgatacgtctgcaaacccagagccaagacagtagagtccggctttgcagactcgccttcctgaagtccttggaatgctggcattccctctagcacttctccctgctttgtaattatccatttacacgtctatcattccactcaattctgaattctctgaggacacggaccaggaatccctactgcccaggacggtgtgcagtgcagaacaaggctcagcaaatgttgagttgtgaaatctgggaggctctctcctggctgtttgggaagtcaggtcctttagaggctaagaatacaggcctggagtcagctgggcatggaattaaaggccttttctcccacttattggctgtccaattttgggtaagttacttcgtatggtttggctgtgtgtccacccaaatctcttcttgaattgtagttcccataatccccacgtgtcatgggagggatccggtggaaagtaattaaatcatgggggcagttacctctatgctgttcttgtgatggtgagtgagttctcatgagagcttattgttttataagagcctttccccctgctttgctctgcacttctccttgctgccatcatgtgaagaaggacgtgtttgtttccccttccaccatgattgtaagtttcctgaggcctccccagccatgcagaactgtgagtcaattaaacctctttcctttataaattacccagtcttgggaatgcctttattagcagagagcagagactaatacattactcaaccattctgtgtcttggtttcctcatctgtaaaatggaaataataatcatctttgctttatagggttgttgtgaggattaccagaagggataaatgtcaatgaaagtagcatggtgccaggcacatataggtgctaaataagcatattgctatcattattattattttaatgagcacattattatctgtgattattagagaggcaatatggcagagttcataagagccagactcccggggttaaattcctagttcagcccctttccagctgtgtggcctagggtcaccgtggatgactgggctagaatagggtgaggcaagtgaggcacctaggacgtaaaatttaaggtggctcctcacctgccaccctctcatcctgtccctattgaatgagccctttgcctctctatgctacatcataagtgataaatgaatgttagcttcttctatggataaaatgagtttccctagaacaactgtctatgtagcggtctgttcggctgttgtatcagaagaataaagctgagcccatgagcaaacacagtgggagtaagcagttaagggcgttcagtgatggagaaacaggggtgacccaaatgcctttctcagagtgcccttgcccatttccaatcaactgcgttttcctagagtttgtgtgagtgggtttctgtaccttgcaaactaaaaacactctctgactaagcagtgatagaaagcaccagaaagcaagctgggaatcacatccaggaggccttgcaggccatgctaaggatgtttggtcttggctcttgctggctactccatttctgatgttgttcttacttgggaaatcacgcgcacaacaacccccttgaacacccactgcccgggcaacttgctcccccgtctgctcacccaggttcctgtttcctcctggctacagaagcaaataagagaagagggtcaccgagggtgctcctatgcagagaacataaaacattcggcgctggcttctctccaatcagaaagagatggtgtccactttattattaaaaaggataaaacggtcttcccagcagctaccgacctgggactttaaacacatttgcatggaacattccctctggcaccatcctggagaatgtctctggctctcctgctctctacaaaggcctgtatatcttttccttgggcctttccagctgaattttaaagagggttttagagagcgcgtcatgacaagggttcttcagagtcttctaaatcataacgcacagaaccgaaagagggctatttcttttcctaagaatgatttgcccactctgattcagtgattcacccaccccaggcacaggctaagaaactttgcaaaaaaaatgagaaacttcccatcctcaatttttcctccccaagaaatccctctcaatctcctctcttttgctctcccctccctcttccctctcccccctctctccatcataaaataataaaacaaacccaagtgcatgtaaatccctcgcagttgctgtagagggggccagccagatgtatttactactaagtggatgcaaattcacttactgctgattttcaaagaaatgagccgcccctgccacaatattgcttttctcatcaccaaatggggcctttgctttgtaatttggtgaagctgtcaaaacaatcagatctaggaggcgggatggtgtctgcgttttggcatcccaagagattgatctcagtggttgctccaggcagctccactcagaaatgtgctccgtgggggaggccatctagggcgtgtcatggaaagagatgggttagctgggtgtggagcacagggcagagccaaggtcaggatgggctagacctccaggttcctcagctgcaaaagcagccccagggagatgtggttctggaccacccaaggggctgcagaaagaaaggtatcgacacacatacttgttcaaacctgtactcttttctaggacttcacaggtccactgggccacagcagccggtccatggactccagatctagaacccatgctgggtagaaaccccttcaactgctcaggcaagtcattggatctatctgagcctgactggatttttcatttgcaggagaaagttgacgaatctgtccccatgttcctctcaagccctagttataggacttctgaggtaaaggacaagttgggagagtatcgtagttgggctgttctggaaagggatgttagtcctcctggagctggttactagtacaggattcttggggttacaaatgatggaaaatcaagtctaactcaagaaaatttgcttcatgccaccagaaagctgagagtattggttttctaattgctgttgtaacaaattaccacaaagtgagtggattaaaacaacataaagtgttattttgcagctctggaggccagaaatccagaaatgggtttatgtggctaaaaccaagatggtggcaaggctgcattccttctaaaagatgtagggaagaattcattccttgccttttgggttctgagaatgcctgaaattccttggctcacagcccacttccagcaatggcataactttgacctttatttccatggccacatctccctccctgactctaactgttctgcttccccttgtgataacactgagccaacccatataatctggggtaatctccccatctcaaaattcttaatcatatatgcagtaccccttttgtcatgtaaggtagcatattcacagattctagaggtgaggatgtggatgtctttgggggccattattctttctgccaactttggggagcagacttcaggtgctcctgaagatccagcacaaggaagagggtgcaagtggctcaaacagtatcatcagggtctttctttcatctttatctctgcagtctgcttccttcatgttagtcatattctcaaggccatttcaaatagctttccccctgctagccaagaaaaatgctgcctctagccctcaattatggcatttcagattagtagatattaatagtttgggaaaaaataatctttccccctctatctttctctctgccctggtccaaataccagtctctgtgtagatcccttgaattaacaaagggatgcttgggaagaagggcaccggggagatatacaaatccttgagacagctagggtgggggttcatcaacctaatttgtagattaatcagcatgtacccatttagtaatccaagctggtgatgccagacacatcagctacaaagtgctctagcagcaagcctggtcattatttagtctcttatagatcaggccaaccacacagagcatgtgcaggaatcccagccctgctcagcccagagcattgacatttgtggttaagcagggccccatggaagccacacacccgtcccccttggtttcaccacgtgtctctgtaactttgagggaaaaggaccctccctcctgggatgggatgataattaagagtaatttcagtcctgttgggctccagttacaacaattacagggttctggatcaattaatactcacatttgcatggagaagatggtgaaatttagaatgtagaccccccatttaggagctatagctagggtgaccctacagccaggtgtgctagggacagtcgtggtttgcacctgaattattcatagttctgctcttcactctcaaagtggtccctgtttaaatgatcagtgttacggttaccctaatgttagtagaagtagaaaagagtttattttccccttctactgtttcacttacccctgaaccaggtgggggactctaaggcagcagctggagaagacccccaaatcacacaggtacccctcttccttgtgccggctgtaaagccaaggaataaaccaacccttcccattgcagggagtgggaagccagtgatgtggcttcctagtagctgtccccagcctctagactgtaccgtctggatctgcagaggcctgttcactgtcatgccttcatgcagatctctggggtaagtgctctgttgctgtaggaaaataacttacaacttttctttgaatgtatttacatgaatgcctatacctttatttaaatgcataaatgttgtcattacatgattcatgtgtatgtgtgtgtgtgtgtttgtgcagactcttagttttttttcctgttagtttgactttccttgacacctctcctctgtcctccacccataaccactagaaattcatgctaatagcctagtagggatccttccacatttttcttcatgatcatattatcctgtataaatatatacatacacacactacatgtggtagacatgtatgtacatacatgtatgtaactttttatacacacccacatgcattcacttatacacatgtgtgcacttatacatgtatagccagccttttgtcattatttgttttgcagaaatatatgatattcagtttcttgcatcttgttttcctcactcaacaataccttggggaactctctctctgtcctccaatattgctctaattgttttcaatagggcataatatcgcatggtataaatgtactataatttatgcacccagacctcaagagtgactgctcactttgttttcatgggagaaatttcccacattcaccaaatataaatgtgtgacactggccgggcgcggtggctcacgcctgtaatcccagcactttgggaggccgagacgggcggatcacgaggtcaggagatcgagaccatcctggctaacatggtgaaaccccgtctctactaaaaaaaaaaaatacaaaaattagccgggcatggtggcgtgcgcctgtagtcccagctacacgggaggctgaggcaggagaatggcgtgaacccgggaggtggagcttgcagtgagtcgagatcacgccactgcactccagcctgggcgacagagcgaaactccgtctcaaaaaaaaaaaaaaaaaaaaagtgttacacttttgccctaatgctcctgactcacatctgattcaaaagtctttaaaaacacatgtcgatttgaaaaatataatcagctgctattttttccaagatgtcacactgacccaccatcaaactgtcggcacagcttggtacacttgttccctacgcagagtcacaatcagccttttgtattctctggtgtttgttgtctgattgcaattctgaattggggtgaccatcaaaactgggtgcctacacaggaggcatctcaatgtattagagaggggccagtctttggaacagacagacctgggttcaaattctgataaccatcacctataagctgggagatttggataaatgctcaccttcccccagcccctgttttctttgtctttcagatagaaatcatgataccaaccacatagagcattaaatgagattatgggtgcacagggcctggtcccagggggcccactgcccaggtggcttttcccaaccacaaattatgaatcatgttggacttgaaggggaaaagttcaaattgatcaatagcgatgtcaggggcaaacagtccgagtcagataagcaaacagaaacaggttgtttttggaataattggatgccctgtctttgtttgcagagcagcgtgtgcaccatggatgtttaaggaagcttattgccagcaatgtccagatgactggtgagccacagcaagagaggggcctggctgcgggagggatccagaaagcagggagctgatggaggtttaggattaggacctgaggaagggatgctagggcaaggatgcgggaggtagcagtggcctgaaccctcctacactctggccacagacttgatgtggcaggagtagttgggtgggcatttttccgcctggcagcagaggtcgctttctgtcctctccccacaccatacatcacactttccaactccaccatactcaaccccctaagaagaagaaagaggaaatgagctccacaacacaggtctgttacggactgaatatgtgtgtcccctcaaaatgcatatattgaagccctaacactccagtgggatggtatttagatgtggggactttgggaagtgattagggttagatgaggtcacagggtaaggcccctatgatggaatgaatggccttataagaagaggaaggaaaagactagagagcatgcatgcgctgtcagtctctctccctccctccttgccacgggaggacacagcaagaaggtggccatctgcaagccaggaagagaggcctcaccaggacccacatcagctggcaccttgatcttggacttccagcttctagaactgtaagaaataaacgtctatggcattctgttatggaagcccaagctgactgagactgcagccctgcctttccttttagggtacccaaaatggagtcctgtggccaacacaagccgtgtgcctcatctcttgccatgttccagtagggggatatagctgtggccaagacaagtggggaggtatctggggtgctcacaggcagggcctggagaggagccctcttctgggcaacttacacaggactctgagatactcctcagcatctcccctccttggtgctaggcatggtgtcttgcacacagtgggagctttatatgtgtttggtgagacattgattaaaaataatagacagcgaatacacgcagatgtggagagagacggaaccagcagttgctagattggaggaaagagtgtattcccgcctcagccccgccctgtccacagctatgaattaatctgcggtggggagcgggattccttcattaaaatctccaaaaagggagtcatattaacagccaggcacaccgttcttttccctcaaggtaagaagattcatggctcaaacttacattttatcacgcacaaccgaataaaaatgatcaatttccctgcccgccttacagcatccttccacagttattaaagtctctaaaaatgttttccttaaaaaaaaaaggttaaaagaaagagaggtgcagagagtgcaaaccaagaagaagctgggaaatgctgcctagctgagggctatccatcttgtcagctgcagaccacataaccttgatgtcactatattttctgctcatatccaaatttacaatttgccagccaaggatatggaaatgccaaacctcccccttggaggtggatgctggaaggttcttaaagagcctgagagagaggagcatcctagctctgaaaactccaaaaagacactgagcctgctgctggactcttagcaattttccctgagttgggaaaaaccagcctccaaggtcaaggagatggatttcaactccagggccacacacacattcagcaagagcccctttgttcattgaagaacaagcaggtttccactttggagggccagaaatgtacctgtgcaagttaggaaatgggagggttgggccacgcaacaaacaaactctggtgtaaaccagagtgaaagagaagtgtttaacctacaggaaagagcaaactgcatgccagccctgcagagctccgccttgcatgcaaacacacaaatgggtaattatacatcattcatctagtgggtccccaagaacctttggtttgccattttggtaatttaattttactaagtgccaagtaatacaattgtatatcaccccatttgtgaattccttcaggacaaggataagattctctctcctctctctctctcccctacacacacacacacacacagacacacacacacggataagactctcttctctgtcccctacacacacacacacacacacacacacactaggtgctttctatagggctctatttaggtctatttagttgagaatggtgaaactatgctttaaaattccataattcggctgggcacagtggctcacgcgtgtaatcccagcactttgggaggccgaggcaggtggatcacctgaggtcaggagttcgagaacagcctgaccaacatggtgaaaccctgtctgtactaaaaatacaaaattagccgggcatggtggctcatgcctgtaatcccagctacttgggaggctgaggcaggagaattgcttgaacccaggaggcagaggttgcagtgagccgagatcacgccattgcactccagtctgggcaacaagagcaaaactctgtctcaaaaaaaaaaaaaaacaaaatccataattcacaatttgttaccaggtcagtctggtctctttccaaattagtgctcattagttaggtcttcctggacttgtttctgagtgaatctggacatctgtcctttgctcacactttgttaacactcagcacttccattctaacttctggagggttccccacattgtagatagggccctggggccctgcagcatagttggagggttgcagcctcccaggaaggccccctccatcgctctaagtttccccagcttgtgagagccttgtatccttctgggagtgttttcctgccgtggctggaagacagccatgaatctgtctcgggccatttgactcgggctcccaatgccaaccctaacagacacttccatcaggcctgacgcgtcaacgatctataagccattaaccagcgctatcagacctcccagattcagcctcctctgtgagaacaaatacagagaagggggaaggagggaggagagaagaggtatagagagagagaagaggagagaatgccaggtcctccatttcctatatggataaatgattgatgatgatgatgatgatgatgaagagagcagctaacaatgacaaagctcactgtgtttcaagtactcttctaaactcatcgtatatggtagctcatctcatcctcacaacaacccaaaaagatacgttgttattagactcactttgcaggtggggaaattgaggcagggagcttttcagagactttgtgaggtcccagcactggtgggtggcagagctgggggtttagcccagttgctgggccccagtgtttgtgctctcagccactctacgcattgcctcccacagtggtcaggaagtcagagtcaaaagagatggagagagttcagctcaaagcaggcaagagtcctagttccctgtgggcggtggctacactgtgaggactggcccccagctcaccaggcagaggagagcagctttcccagagattccctgctcgggccacagagacaaaaatcttccattccttctagaaataacagtgtctaagctgcttcctcagtcagagcccctcagaccatttgtcactccaggtccacaaccccagaggtggttcttagtggccacagcctcagctgcagctcccctcaccctggccaaataaaggggacaggtctccaaagtctcctcatgtgccaatatccccttctcacgcaggagagatgggatgggaagggatgagacggaatgagtgctggggaggagatagaagggaggggatagaacaacatgggacagggtgggatgagaggaaagggaaggaaaggcacgcaatggaatgagataggagggtacaatgggaagagggggaaaggggcagaaaaggaatgatacgcgatgagttgagaagggaaagggtggacactggctttttttttttttttttgagacagagtttcgctcttgttgcccaggctggagtgcaatggcatgatctctgctcactgcaacctccacctcccgggttcaagccattctcctgccttagcctcccgagtagctgggattacaggcgcccgccaccacgcccagctaatttttgtattattagcagagacagggtttcattatgttggccaggctggtctcaaactcctgacctcaggcaatccacccgcctcggcctcccaaagtgctgggattacaggtgtgagccaccgcgcctggccgacactctctttttaaactatccatacactcccatcacccctttttcctagaaaattacagacagtcattagaacagaaacatccctgcagccccaacatctcctgtgtagcacaatacatggcagttagtgacccactgccattggccaggattgaaaagagtccatgataggtgtaggagctcccacacccttgcaggctggctccagaggcttcttcccaagctctattcccaagctttgggccccaacctacctcctttaaggccaactaaatcctcacctcttccaagaagacttcttcaactatatccttcctttctctcactcccagctctgtttagcatttgtcacccaatttaacgcttgcttctgtacaatgttgtattgatctttaatcttgtaatccagatctatagcatatagcctgtgcttctgcctggtggcaaccctgaatgaatttaattcttccagcatttaagaagcagaatcacagaactgtggagcattaaccctcctgttacaaatgcagaaacaggctctgagaagtcaaggggcatacctggcatctcatggctggtgagccagacagctggggcacccagagctcagcatcctgactccctctgctgcagtgcggggagcttcctgccttagtcagggttttcctaaaaacaggccctccaacaaggatgggagtactggtggtttatctgggaggtggctgcaggaggcactgtgagggaggggagaagtaagaagaggaaagaggaaagctgattaaagaggtaggtttcccttgtgcatcctgggggcccaacccctccaggcctccaagaggctgcagaactcaccaggaagccagggcatttctccaggagcccttgtccctcagggttgagagccccacttagggagttaactcccagcacttctagcctgccctgcagggctgagcccccttccatggccaaagaacccataaaagcaaagagcagtggttgttgggggtacagagccttggcgtgtgcatgaattgtctaccgcagctagggtgtcctctgggtgggtcaaggaatgaagggcaggccacccacagggtatgccacgtttgggaaacacttgcccatccatgggagtagaccttggtgccccaactttctttcacatctgtttccggttctctttttgataggaacaaatctctgctccaaggtgtcagatgaaagaatggtgctccccaccctctccccaccccagggatatatatcgtcatggggactttgatggcacataaggaaaagcgcactgtctgatgacatgtggcaggtgatatttgggggtgccacacattccagccattcctcccacatgtgcaagaaaaggctgcctgacatagtagcctggctgcttctgtgggccccttcttgctgggcacctcccatttgcagagctcctaatgagggacaatgtgggtgtcaggacagataggaggatgaagcagatccctcccagccccccatgctcctcatggagggcagatgggggcctgggagctggccagcccagcaggtatgatgggtttgtgcacggggatctactcgggagcccaggagtgcccagtgcaggtggccataaagaagaaatacaagcagcagtcatcaggtgtttgacacaattcctgacatgctttccccagacagggcatgccctgagtttacaaggcaaatgcatttatcacttctgcctcatgtcccaggagccaagctcacccctcagcctggaaatctgggcctccccatgtggcttgcttccccaaaaggtgccctgtgcctagcccctgcccctctctgcacatacatgcatgcatgcgcatgcacaaatgcacgtgtgcacaaacatacgcacatatggaggcacacatggaaagcacctgaataaaagacagccagcccaaattccagccacccctctgcctgtatgtagctccgagccctgggatgcgtcatggccctcatggggccttatttttctcctctgtgtcgtgatgattctaaagaacccccagggatgctcagctccctgtccagagaagttacagtcccatggatggacagcagaggcatctgttggccctctcctccaaggaggcatagtccaccttcggacacgacctgccatggtgatagcccaggcctgccaggagaaagaagtaggtgtatgggtggttggtggcatcctgctttgccctttttgcagcagagatcaagaccttggattaggttgatctggtccagcatgggaagaatgtcaaacaccccctcactaaagtgacacaccagccagcaagccagccctttctcccaccttcaactctgcttgtatcagcagagagggtcgtgttaaaactggctttggaatggtgcctgggaagctgggaggggcagttccccagtgtctctgcctatgacactgtgcggaacagcctcaggatctgggaggcaagttctttgcagaagggctttttagcaaggccctgttctccacagtccccagatggtaggcctaaaccaaagggtttctaggaaacagaccctcatagctggccactggcctatgaagacagagctcagatgcccaaataagtggaggactcttccagggagagagcagtgaactgagcccccgagagcccaccagcatggaccaggacagcccactatgggacacaccctcccacaaggtgccattgttttgcatttgcaggatttgatttttgtttgctgagattatggagcctgcatatagttcctgatttttgcaaagcacatctcaaacttctcacctgttagcactccccagcatcgtggctgagtgggtgattatcaccataccccaggtggggaaactgaggcttcaggagtcgaagagactgagttaagggcatgcagtgagtcatcagctgccctttgcttcccacacacatttctcaccaagctctctgaggccacactgcttcctggagtcctggggcatatccactgcttttgccaaggtgggttgtggcaagcgggtcactgggaataggagacaggcgttctcaaagagtatataaaggaaagaaaagaataaaggggtgggaggggcacatgatccaaaatctcctctgcagcaagctcttgtaactgcatgtccagcggcccccccttccttgcaccttccttttttacatcaacattcaatcatcttttcccattcacttcatctcttccatctttatcttacgctgcccgtgaaaactggtgtgaaataaaaaggcaactctgcctacagatgtaatcaattgatttggcaggtagtccacagacacctaggaagaggacagccaattttcagtggacatcctcccccacttctttttcttcctctacttcctcccttccgggctctccgtccccctccttttatttttctgtctccttccttttggccttgctttgatcttcttgttattttctgctttgtatttaatggaattagaccagcctatgaattttcccccgattctttctttcttcttattttatataacagacagcagaggggaaggcgtctgtcttgcccgactctctatctctgcaccatgctgtgagagctcagtattcccaggggccttgtcaatcttcctggggaggtgggaccacgatcaccatcttgaaggatcccaaactcctgccccagataggagatgggtccataaaacaaatcctagagtggaacagctctccatcatccaggagaggagaaagtgttctatgaaggagaattgtttattttcattcattcattcacttattaagcatcactatcggccaggcactggggatatagaagtgaacaaagccgtcattgatcccgcccaagtacattgcctggtgcacagtaggtgctcaataagtagtggccactcttggttatcattcttctggaagtatctatgatagtgcaagatgtatactcatgttcaataaatgttagtttcctcacttctagagacactatctcggtacgatgtctgtttattggtctttttattgttttaacacaaaaagaatagaggggtgaaattaaaatgttccctctggcctaatctagattagaagacaatcattagatacaaacgaatgtgtaattaaaaattgtgataactgggataaagaaaaagcacagggtgatatgggaggatttcatttagaaaggggtgggggaggaatctggagcctgtatcttaaagaagcatcacataacccattggctctcaaagtggggctctctcagtcacagaagcagcagcatcaggaacttactagaaatctacattttcaggctgccccagaactactgaatcagaaactttgggcaccagcctttccaggtaactccaatattcccacaagtgtgagaactgctcatgtaagctgagactggaaggaggagttggagctggccaagtggtggggagaaagaaggctttctaggtggagaagatagcatggactggggccctgaggcaggaaagaccaccagggcaagggtatagggagggagtgtgagaatcagacctttcagtgccttagaacaactggaaagagtgtgaattttctaagtccaccgggatcccctaaggcaggggtcccagtctgtggcctgttaggaaccgggccgtatagcctaggggagtggtgggcgagtgagtgttactgcctgagctctgtctcctgttagctcagcaatgtcattagattctcataagaggctgggtgtggtggctcacgcctgtaatcccagcactttgggaggccaaggcaggtggatcacttgaggttaggagttcgagaccagccaggccaacatggcaaaaccctgtctctactaaaaatacaaaaattagccaggcgtggtggcgggtgcctgtaatcccagttacttgggaggctgaggcacaagaattgcttgaacctgggaggtggaggttgcagtaagccgagatcacaccactgcgctccagcctgggtgacagagtaagactctgtctcaaaaaaaacaaaaacaaaacccaaaaacaacaacaacaaaaacattctcatgggagcacaaatcctattacgaaccagcatgcaagggatctaggttgtgtactccttgtaagaatctaatgcctgacgatctgagatggaacagtttcatcctgagaccatcctcaccccaccccacccatggaaaaattgccttccacgaaaccagtccctggtgccataaatgttggggaccactgccctaaggggttctaagcagagaaatgaagccataggatgttgatgtcatagagtcctatcactgcccacagctggctcctagttccttccccggcctcacctgccctgttggaggggctcttctcagcccctgagaaaatggcactcttgggtggtgcaggaggtcctggtagaaggctctttcttttcattcatgcctttggatacatgatgggattttctgtcttcatattttatttttacctcttttcaaatatcagtaagtggcatcaaaacagtgggattatgggttatttttgtttcttctccacaagttcttgaattttatgaaataaaagcaaacaaaattttataaagccaatatttatcaaatattattatatgtcagtttttttttgagacttccctttttattcattcaacaaatattttttgagcaactgctgtgccctgggcattgtgcaggcatggggatagaaacggaggccaacattctgccgcgacggagcatctgtgctcatggcgggagtgagaccaacaaagtccaagagcaaaatacatctcagtgtctgcctgggaaggggagtgagccatcccaggtgggactggtcagggaaagcctgagaaggtggcggctgggaaggggagtgaggcatgccaggtggggctggttagggaaagcttgagaaggtggcagctgggcacagacttggggagaggaggcggtgggggtggggggatgaagaggtaggtaggggtgggaggctcatgagagcaggaaccccaagcgccgaggtgctgagcaagagcaggaaaggacgcagggtttagtgagagaaggaggagaggacagggaggagtggggaggagcctcgtgggctgccaggaggattttggcttttacaccgagtgacatgggagcccatgggcagggcaatgggaattctgacattctgaaagggccactgggctgcttgctgagaacagctggtgagaggggcagggcaaggagagaagggagctggcaggagaacctgctagaaaccaggtgggagcggatgggagcctgagctggagcagcgagggtgggatatggtcagatgctgaatggcctctgaactgagcgtcggcgggatctgctgctgggccagataagggatgagagaggaggcttgaggatgacctgagtgatgaaaagacagcactgccacttatgaggccagggaaggctaggggagaagccagcgtttctaggggaaggagctgctggttaattcagtgttgggcatgtgaaatttcagatgccattgtgtcgctttggatgtcccaaggagcagatgccaagacaggattggacatgggacaggcttactgggggcaaagtctgtgaaggacaaaggggaggcagcaggtgctggcagactgccatgcaggcctggcacctgtgaaaggagagggggatggaaggaggcctgagaggaagagcttccgtccacagcacagctccaagagtgttcattcagaccgatgagaggtccttgagccaaaacctcccatgggggtatccaacatcccacatgtgtgggcctgccctgacactgccccctctaaccccatcccacctgctcagctattgcctgggagaagcccacatcatgtgtggcttcagcacaccataggggtgggcccactggggcagtggtggggtgtcggtcaccatggtcccctcaacagaagttgtgagtggagcaattttacagccgccacaggctattagacacgtaagtggagatatctagtaggcagtttagatatatgagtctggagttcaatgcaaggttcaaggaagagataaaaatttaagtgtcttcagctcataaatggtatttaaaggcatgagaatgcatgagcgcgtgcacagctggcagggacaaacgctccaaggactgagtcctgaggcatgtttgcaacagtcagcaacagtggccagggaggtaggagggaaaccaggagtctgtgagctcctggaagtcaagtcaagaaaatgcttcgtggaggagggagcactacctttcagaaaactgcccatcacactggcaagcatccttataggccaggcaatttgctgaagactctgtgtgcatcaccacactccacgggtcttcttccctgttgtgggtgaggtgctgtgctgccccgatgccctgtcagggccaacacagccattccccagttgctgggagtattggctgctgatgctgaaagtcacaccccctccccagggacagcctgtacccagagacggttgacacagcttccctgccacatttgggacacctcaagtggaccatctggcttacaagctcctagggggaccagctgaagcctccgttgtagctacagagttaggtagattcctccatcagagtaaagaaccgctgactgcatgggctggaggaacagggtgctacttgctacatcttatcttaaagaatcttttggatgctttggtgagaaacaggaaactagcagactctctagccaggccattgtaggtttgacccacttcaccccctcctgacactcccacctttcccaccacttttcctcttttctgtagcacttaccacctgccaacctgcgatttaatttccttatttgttgatctattgtttattatccatcttccttctttcctacaatgtcagctctaggaaggcagggctattcatctgttttgtcccctgatgtatcccaagtgcctagaacggtgtccactgcatagcaggtgccagtatacatgcacgaaatgagttcctggacgagctgaccttcaagagttcacagcccaactctcccatttttgctgaatcccaccatcccacgtgaacagaatgagccagacctccaaacccacagaggcagcgtggggtgctgggacttaccacggctaggaggcagtctcctcacctgcaaggtgggatgccaggaatggtttgctcacaacacggtcacagggagccacctcgaagccttcctgtaacgctgatcaatgaggccaaccctatggatggaacccatagtccaagccaagtctgaggccttgtttcaggggcatccacagcacctaaagggtgctgggaggggggcgttcgttgagaacagcacacactgtactcctacaggaggagaagacagacccattttagactgacggctgctctgaaatgggggactcagtgtgagattcccgtgctagagaaaagagtctcagttattcctcgtggtaagcaggcgtggctttcgatgggaagtcctgccttccctgtttcccagccatgtgaccttggccaagtcaaaaaaaatatcctggagccttattatctgtcactacctgtcaaatgggaaatgagtgagattatgtgcctgaaaatgttttgtaaattccacagcagtggttcccagactttgagatttcatagacgagggaagtttccagtaatctggagcttacataaggattccagcgttctattttgccacctaaggacactgaaacacaagcaagcaacgaagcggtggcttgcccatcgtcactattctgtcatcaaaggcagaacacacttcatgctaaaaatggaagaaggccaaaaatctgaacaaaagatagtctttgcagcttgaaaaaaaaaaaaagtgaacttaaaggaaaaactcactgacttgtccttgattttctcatgttgccaaagacaagggaagtttctctctgggaacattgtgaaatgatgaaatgagagggctgggatggcgcacccaggcaaacaagagaagctgcccaccgtggaggcggggacccggagcttcaggctctccggggctgaggggggtcaaagtctccacccacctgacacccatttgaagcatgctggtgcacaaaggtactgcaggtgggaagctttctgtagggttccctgaggaggacggagtaaagggcttctcttcacaggaggagtgagctgggagtcagggcctggttagcaggaacacaacgtacatgtgatcaatcctgagtgctgagcactgtgcgaagggcttcctgaaggttataggaaggaactattatcattcgttttgcagcttgggaaactgaggcacacagatgtttccattgcttccccaaatctcacagctagtcagtggcagagccggggccctaattcagccagtctcgttgcagaggaagtgtgtttaaccactcactccaaagcatgatctccagagcgaggaaagggcttctctgctgatgcaaagaggcagatttctagcagaatcagccctgatcctgatgctcacaggctggcatgttgggtccaagacggcaaagctacttttctgtatgagttccccattgtaatgggttgaacagtgacctccataaaggtgtgtccaagtcccaaatccctggaatctgtaaagggaacctcactgaccttatgtggggacagggttttgcacaggtaattaaagatcttgagatgagggacgggcgcgatggctcaggcctgtaatcccagcactttgggaggccgaggcgggcggattacttgagtcgacgagttcgagaccagcctgggcaacatggtgaaacccccatcactacaaagaatacaacaattagccgtggtggtgtgtgcctgtggtcccagctactcaggaggctgagaggggaggatcacttgaaccagggaggcagaggctgcagcgagccaagatcacaccactgcactccagcctgggtgacagagccagaccctgtctccaaaaacaaacaaacaaaaatcttgagacgagatcatcgttgacttagggtaggccctaaacccacggaagggtgttcttataccagacagaaaaggaacagacacagagacacagaagagaaagccacaggaggaaagaggactctgtgcctcagtttcccaatctgcaaaacgaatgataatagttccttcctataaccttcaggaagccctttgcacagtgctcagccttcaggattgatcccatggatgttgtgttcctgctaaccaggccctgactcccagctcactcctcctgtgaagagaagccacaagaagacagaggcagggactggagggatgcgagtctgggagccacgccacgccaaggactgtgcagcccccaagctgggagagagccctggaaaggatcctcctgcaaagcctcccttagaaagcaactctgctgacaactcgaatttcgactctggcctcctgaattgtggagaaatacatttctgttgttttaagccaccagtttgtggtagtttttaaaagcagtcccaggaaactcacacatcccctttcctacttcctccgcgccagcttccaaacctctcccccatgagaggatcagagaattcctcccagccctccagcagtgagctgctcccccactccattcatctcccggttcctcgcattcatcccccaccgaacccacccacaaaatgctgaatcggtgggtgagatccccatagcaacggctccgatgccagaacccaggattacgacaccggatcagccagagacgcgctggaggggcccaggaggggctgcagcgcgccgcaaatcccccggggcttacgggagccgctctttaggagacagcgctggacgaaccgggcggggtggggatggataatcttcaggcgccaacgcaaaacggccgcaagacgtggccaggccaggaggctcctgggtcccgggcccgcgatgtggcccttgcgcggggacaaagacgaggccatcgccctcacgtgttcccaaagacgcccaacctcatcaggaggccgccccatccgccacctgggagcgtcccacacgcccgggcccttgaggatgtcccctcggcgatgtgcctgaccgggcgctccccgcccgccaacctccaacctccaacctccgccctccaccctccaccctccttgctctgtccgcgtggacgcagcccccggttcagacactagcgggtgcgcggggccgcccaggacggcgggagaggacggggccctccctcccctctggtcccccaaagctccccggacgccgcggccgcgccccctgccggctccctccggccggctcccgcgtcccactggggctcctctcccgctgcaaggtcagcgcttccccgccccacgccctccacaactccccgcccttccgttcctgctgccgccgccctctccacccaggctcctgtcacccaccacgggagttcacacgctccagtccatcggcctcccccggcccgaccgccctggctcaggcaaatcccagcctgcacttcccgaaggaagtcccctccacgcacacaccctacacgcacgcacacatttacacacacgccctcacacatttacacacacgccctcacacacgcaaatgcagacaccccctacactcacccttacacacacaccctcacacattcaaacaccctcacacacatacaccctcacacacattcacacaccctcacacgcacacagaaacgcagacccccccccctccactcacaggtactcacgctcacacaccctcacacgcgctcacacacacacttacacgtagacacattcatatacactctcttacacacattcacacaccccccccacaccctcacgtatttacaccctcacacacacattcccacatgcccatgcccacacactcacattcacacaccctaacacacaatcacagacacacacacacaaacacacaatcacatatacacatacacacagacacacacagaatcataaacatacacacagagacacacagaatcacatatacacacacatacacacacagaatcacatatacacagacacacaatcacatatacacggaatcacatatacacacagacacacaatcacatatacacagagatacacaatcacagagacacataatcacatatgcacgcagaatcacatatacacacacagacacacacagaatcacatatacacacacaatcacatacacacagacacaatcatacacacgcagagacacacagaatcacatacacatatacacagagacacacacatatacacatacagaacacacagaatcacatatatacatacagacacacagaatcacatacacacagagacacacagaatcacataaacacagacacacacaatcacatatacacacacacagaatcacatatacatatacacacagagacgcacaggcacacattcatgcacacattcacacagattcattcacacacagacacaccccctcacacaagatcacaccacacgcatgctcattcacacacaacaccaacacccacattcattcacagactcacaaaacttacacacatatacgcacacaccattcacacactcatgcaagataccttacaaatacacagacacacgcagacacaaatacacacatagacccctcacagatgcacacaccaatgcacacaggtacactcatttgcacaccacacacccacttacacaccaatacacatactggcacactcatacacagacctataaacacacagacccacccatactcagacatactcatttgcatacccactcagcaacacagactcacattcacatacatgacagagacaaactcacacaggcacactcacattcacacaggcacattcacacacaccctattatgcacattctcacaacagacatgcttacacacattcacacagtcacacacacacacacacacacacacaatctcgtactgaagcccaggcagtgtctaccagctacacagacattgtggacagtggagtggtgagaggtacaggcgtattcaggtcaggcaggtgggatctgagcagaggcatcatgagcccaagggcaccttggtggcaaggacatcacctattgtttctctgcatcttccccctccccgcccaaatcatgcagcacagtgcagggcacacaggttcatcataagtgtttcttcaatgagcagacaggagctacccaagcttcaatgtacgtaagaatgcatagtggccgccattttacaggttgaacttggagcttcaaagcagccttggataaaaccactgggccattctccaaaaaagagaatggagaatgtcaacgtccttaattgtctgcctgtattccatgtacttcctgacttagagccttgattgacaaaatccccgttccaagaaaatctccctgcatcaccgcaggcactgtgtgtttggcaagtagactttcaactttgggttgtggcatgaataaataaatgactaaatcagcaagcagttttccctgcaccttggcacaggtctgggtacaatcaaggcatcagtcaagatgggagggtagtgggtgggtgtggcctttaaaagatgggagttctgcctcagctcactacttagcccggcacagtggctcatgcctgtaatccgagcactttgggaggctgaggtgggagaataattgagcccctccagtcaaggttgcagtgagccatgatagaacaagatgttgtcaaaaaaaaaaaaaaaaaaaaaaagaaaggaagaaaagaagaaaagacagaaaagaaggaagggacgggaaggggaggggagatccgaaaagcaaaaactaaaaacctcacttctaaggcactttctggaatcgttccactccactcggatctccctctttattgggcatcgttttggtgagtaatgaattcaacctgagccccattcctgtgggaggttagccatttcactttcctagatgtgtgagtatgtgtgaacctatcgccatcacctcttctcccattagtctgtaattccccctgagcagatcgggctgtttccattgagatttctttggcaatgatgacacaactctgccagcagcaagtgtccagccagacacctgggtcaccccctagttggacggtgctgggggaagctctggcatgggcagctccacctcggatgcttcctggagtagatgttctggctggtgtccatggagatggaatgggagagggacttccttagccacagccacgcatgtcttcccctttatgggaaagtatctgagtgctggtcattttcagaccctagggaagtatctaattgccctcctggagagcccctacttatagagaagatggcaaggctgtcagagaatccaatgccacatttcccaaaaaaaggaggaaaggcgggccccaagagggccctcagcaggtacagaattggaactgccagacagacacgccttttcccatgctacaaccttggctgccatgcccctactccccttactcctgcttctagaagaaaaggaagggagaaaaatgcaggaattttccagaaagatccagaaactcccccaaattgccagaagtctccaggcttgtatattaatgcagtggtgcagtgcagtaatttactctaactacctgggtgtgcccttgattctggctagattagattgaatcaacaaagaagcagcacagagtcctccagtgctggagctgagaaaccccagagaatgcaaggaggcttcatttcctgattttctcatctgtacaatggggtggtaatagcacccacatcacagattgctgtgaggactcagtgactcagaccatataaaacgcttggcatggtaccttccacatagcaagtgctgcataaaggctgatgatgatgaggccgatgatgaaggcaaagaaactactccttgcccaaggtcatctgggcgacttagtgacagagctgcaattagaacaggggtctctccaagttaggccacgctggatagccttgctgccagttcctggtgcttttgtatcttcacgcctccccccaggcccagctgagcaccatcagggcctcaacagaaccaacagtgccccctgcaggccttggcctcctgggactgttcaattcagggctgaggcctctgggagcagtgggaacgtttgcctacaaaacaggttctgtggaatgctgctgggacactagggttttgcctccgaagatggcttccctggagtcaacagttgcctgtcttcttcccgcctcactcctcctcttgccaatcttcttagcacccaggattaagcataaacatgggagtaggggacacgagacccaggttccaggacacttaagccactggctggctccgtggctgcaggcaattcccctgacagtcctaggcctctttcctagaggccttccaacgtcccagacagctgccaagtccaaggataccctgagctcctctaagctctggccagcaggagttcaggacgtaccttgctgcagtgtggggtgatttgggcgccccagcagcttattcagagggtgcaacatcaagttcatttcctccttcctcgttcctgccagcccagcccagcccagcccagcccagctcagcccagctcagcgctgggccctccacctctgcttcccctccaccacctgtctagggcagtgtggtccagggtagctgcaggcccacgtaccagcacacattgccgcctgtctgggctctcctgctgtgtgtgctgcttggggaagagtgggatccacccatccatttttatccagcacttcgcggggtcacattatgtgtggagtgtgtgatgaagccttccaatgatgcctcctgacagagccaaatctgacttccataatggcctgagaaaaggtcatagcctgggactctgtattactctgtcacagaaattaaaggagcagtttgccacaataaaggaccgtctgcttggtggcctgctcacccttgccggcttcctcctgctatcttttctgataatgtggataagaatctgcttgcaatggcaggcaggattaattcactctccagcactacagagaagccgctgagtacagctgcctccgccacctccctggggacacacctcaggatgaaaatcacagctgggggtgcagggagggagccgtactgaagagtttatgttgaccaacttctttcctagggtttatctctttatttgccccaccctgatccaaaaagtacacaagaagaaaaaaacccgggtgctaacaatgtgctagtttttttcagtggttatttgtgggagagggcatgggaaaagagctgagtggggttagggatgtgagttttcaattattaatttgtacatatattttaaagttttgaataatttttaaagtttttgaattttccaaatgaacaaaaccaagcaccttccctgggagatggtaaatgcatgtgttgaaatgcctgcatcgcatctatatgcaagctcaggtgaaggtgggtaagcaaggatgccgctgagcccgacaggtgtggggtttgctggggggtggagaggaaggacaaacccctggaagagtgagatgaccattcgcagctcccagcatcacttaagacttgatattagataacttggtcagattaaatagaaaacatttctcaccagcatcctaaatctctcttagttttgatatttacttatgatgcttgtttttattttatttttttcttgaaagggtttacaggctccacacccccagtctctgtgcatggctttgaattttacaaatggaggctgtagcctggggaagacagtgctgcttccatcgtgagctgcgctgtggctgtctccttcccatctgcaggaattgaggaattcctaagatgacttgtttgggggctgctttgctgctgggggtggggaaagacaactttctggcagtggctcttgagtgaaccaaaattgccatggataacaaatgatgcaatactaggtcctgagcaaggaaaaggcataaaccccggaattggagaaagctgcttctaacataactgactcctctcagttcttgagagtaagaaccacagagcagaaaaagtgctgggtgcctcagctctgcagcctggtccaggcgaccagctcccactcctgctcctgacagagttgaggaagaaaagatccagctctgctgaagataggtcaccttgaggaagagtcggttcaaaactttgtcagaagaagcctggaaaactgtcaaagaacctcacatccctgacaccagtgaatcttgactcctcacatgacagcaaagcccaggagggaggcattttcagacaattcttggcaagacgcctccggatattacagtccttgcaggtgtatacaaacagccaggagggtcagaagacaccaatgctggcggcttcgggcttcactcgaaggacatttctctgatcatttccaacaaggccctgagccaaagtatgtgaaatcctccgcatttttttctttcacttttttactataagaaaggacaaatatgtacaaataaacagaagagtgtgatgaatccccatgaacccatcacgaagcttcaacaattatcaacattgttttgtcattctggtttcatctatccctcctactcaacacctctacactagattattgggttttattttgcagttttttagataagatttatatacattgaaatgcacaaaaatcttccctctacaagtttgacaaatggatacggccatgtaacccaactccccactacaatataggacattgatggggtttgggtgtttgtcccctccaaatctcatgttgaaatgtgatttccaatgttggaggtgggccttgtggtaggtattggatcatagggtagatccctcacgaatggcttagcactacctccttggtgataagtgagcttttactctgagttcacaagagatctggttgtttaaaagtgtgtggtacctccccccattgctctctcttgttcctgttctcaccatgtggtacactggctctactttcaccttctaccgtaattgaaaacttcctgaagtctttgcaagaagcagatggtggtgcaatgctttgtatgcaacctgcagaaccatgagccaatgaaacttctttctttataaatttctcagcctcagatatttctttatagcaacacaaaaatagcctactacacaaaattggtgcctaggagtggagtgttgctatacagatacctgaaaatgtggacacagctttggaactgggtaacaggcaaggttggaagagtttggagggcccagaagaagacagaaagatgagggaaagctttgaacttcttagagacttgttaagtgactatgaccaaaatactgagggaatatggacggtgaaggccaggctgacaaagtctcagatggaaatgaggaacagattgggaactggagtgagggtcacctgtgttaagccctagcaaagagcttggctgcatggtatccaggtcatagggatctgtgaaagttgaacttaagagtgatgatttagggtatctggtggaagaaatttctaagtagcaaagcattcaagaagtagtgtggttgcttctaacaacctactatcagattcaggacaaaggaatgacttaaagttggaactttaagttccaacttaaaagggaagcagagtgtaaaagattggaaaatttgtggcctggccatgtgattgggagtgggggaaaagcattttcaggagataaaacaagcaggctgcagagcaaccacttgctagagagattctcatgagtaaaagggaaccaagtgctagtatccaagacaatgaggaaaaggccttgaaggcatttcagagatcctctaggcagcccctgccatcacaggcccagaggcctaagaggaaagaatgtttgcaggagcaaggcctggggccccattgtgctgctcaacctcaggacactgctccctgcatcacagctgctccagcctcagctcaaaggggcccaggtacagctctggccaccactctagagggtgcaagccataagccttggtgggttccacatggtgttgaacttgcaggtgctcagaatgcaagcataaagaaggcttggtggcttctatttagatttcagagcatgtatggaaaagcctgggtgcctggcagaagctgccacaggggcaaagcccccacagagaaactctactagggaaatgcaaaggggaaatgtggggttggaactcccacacagttcactgcctaatgaagctgtgggaagggggccaccaccctctagatcccagaatggtagagccactggaagcttacatcctcagcttggaaaagccacaggagctcaactccaacccatgacagcagccatggggactgcaccctggaaagccccaggggcagagatgcccaaggccttgggagcccaccctttgcaccactgtgccctgaacgtggaatgtcatttcaagattttagagctttgagatttaatgactgccctattgggtttcagacttgttgcccctttctcttggtagatttatcccttttggaatgggaatgtatacccgatgcctgcaccaccattgtttcttgggagtaaataacttgtttttgatctcaggtttgtaggtggaaagatgagactttggactttagacttttgacttgggactgttaatactggaatgagttaagattttggaggattattgcaaagtcatgactgtattttgaaacgtgagaagaacatgagatttgggggatcagaggcagaatgatatggtttgggtgtttgtcctctccaaatttcatgttgaaacatgattcccagtgttggagatggggcctattaggaggtgattggatcatggtggtagatccctcatgaatggctttgcaccatccctttggtgataagtgagttctcaatctgagtttgcaagagatctggttgtttaaaagcatatagcacttttcctcttgctgtctcttactctctctcacaccatatgatatgccagctccaccttcactttccaccatgattgtaaacttcctgaagccctcaccagaagcagatgctggggccatgcctcatgtacaggttgcagaactatgagccaattaaacctcttttctttataaattacccagcctcaggtatttctttatggcaatgcaaaaatggcctaatatagacattttcatcttattagaataatctatagtgtttcttccctgtcaatatcccccacctttgtcaggcaaccactactcaaattttttttcaccatagatttgttgtactggttctaaaaatgtatataaataaaaccatatggtatatacagttttatgtctggattaattctatctgcttaactacagtaagattattccatgttgttgcatgaaccactagttccttttttgttgctcagcagttttcccttgtaggtttattccacacttgtgtatctactcttctgttgaaggacatttgcactcttcccaatttgggttattattaataggattgtaatgaataattacacataggactttttggacgtatgttttccttgctcttggataaacacctagaagtagatttactgggtcaaaagataggtacatgattaactttatgagaaattgccaaaactttcttgaaagtggctataacattttgcactcccacaaagcacataagacttctagttgcttcacatccttgtcaacatttcttgttgaaagtctttccactttagactttccagtaggtgtgactatgtagtatatctttttatggctttaatttgcatgtacttgataatgaatacaatgttgagctcttttatatgtgcttattgtccattcataaatcttctttggtaaggtgtctcttaaaatcctttcaccattttctagcgagttgattttcttttcattattgacttttagatgttgattttgtattctaaatataaatcctttatcagatacatattttgtgaatgttttctcccagtttgtggcttgctattttcttaattgtgtcttttgatgagaagtttttaattttaagaatttatccattttcttctcttacagttattattttctgtgtcttgtaaaaaaacaacaacaacaacaaaaaacttttcttaccctagattacaaagatattctttttttcctaaaagcttttaaatgttagctttaatgtttgggtctatcattcatcttatattaattattgtatgttgtgtgagataaaggttgaaattctcttttattctcccatgtagacaccaagttgttctaacagcgcttgttaaaagacttttctttatccatgtaaatgttttagtcccactgtcaaaaatcaattgatcatgtaaatctctttctggcctattcttttttattgaccagtttgtctactattatactgttttaattactttacagtgagtcttaagtttagaaagtataagtttcctagcattgatcttctttttcaagactggttggttattctaggtcttctgtttttccttatgaattttaaaagcatattatcaatttctattttataaaagtctggaggagttttgattgggattgaattgaaatataattggggagaatttacatcttaacaatattgagtcatctaattcttgaacatggtatgtctctccatttattacagagataattattatagaaatacaaaaatacattatggaaattattacagaacctgtcatttgtctcaatagtattttgtagttttatgtatacagaccttgcagaccttttgataaatttatttctgctatgaggctaggagcagtggctcatgcctgtaatcccagcactttgggaggctgaggcaggcagatcagctgaggtcaggagtttgagaccagcctggccaacatgatgaaaccccgtctctactaaaaatacaaaagttagccagccatggtgatgcacacctgtagtctcagctacttgggaggctgaggtgggaggatcacttgatcctgggaggcagagattccagtgagctgagattatgccgctgcacttcagcctgagcaacagagtgagactccaactaaaaaaaaaaaaaaaaaaaaaaatgtatttctgctatggactgaactgtgttccctaaaacttctcatgttgaaaccttaactctcaatgtgattgtattttgagatagggctgagatataggaggtaattaaggttaaatgaggtcataagagtagggtcctaatctgataggattggtggcttaaaagaagaggaagagagttcattctctctctccatgagcacaaacctagacaaggccatgtgagaacacaatgagaagatgaccacctgaaagccaggaggaaagccctcaccagaaccccaccatgctggcaccctgacctcagacttccaccctccagaactgttagaaaataaatttctgttggttaagttgcccagtctgcagtattttgttatggtagcctgagcagattattttgtttttattttttgagagacaatttagctgggtgtagaattctgggtagtaggttcttttcttttcctttcagcactttaaagttattgttcccctatcttcaacctcctttgtctctgatgagatgtcaggcaccattagtatcttgtaattgaatgtggtggtgtttttctctgttttcaagagttgttcctttgtcttcagattttagctatttgattatgacgggcctagatgtggtccactttgtatttattctacttgggattcattgagctttttggatctataaattcatcactagattttggggattttcagtcattatttctacaaatatttttctgcctgattttctgtcccctctccttctagtactccaattacacatattttagcttgatattttccacatatttatgaggttctgtgcatttctattactttctttctctgtatttttccactggatactttctattgacctaccttcaaggtcactgactctttcttcttccatttccaatctactactgaatgattcaagggattcttttatttcagttatatacattttaagtgtaaaactgtactgcccaataatgtaatcactgtgtgccttttaaaattctaattaatttttggttcattcacagcagctacatttcaggtgctcaagagccacatgaggctagtgactattgtgttagacagtgctgatatagaacagttccattgctgcaaaagttctttgaacagcattactctagaatttccatttggctctctatgataatttctatttctttactgtgatttctcattttgtatgtattttccatatgtatatattttaagtctttgagcatatttataatagctgttttcaattccttatctactaattgcaacatttggatcatcctggggttgatttctactgatgggattttttttttttggtagaggcaacattttcctatttatgtgtctagtgatttctgattggatactaaacattttttttaaatacactgtaaagactctgaagtctgttttgtttttctgtcaatttattcagtcatgcaagccaattgagtatctcaatctccaaaaatcatctcccccttgaccagtagcaactaaaatctccaccagtttcttccacttccagttgcttttttttttcctgatccttatcattattattagaccaatatcattatcaaatccacccaaaaaattgtcaagtctcttctcaatatacatatcttagatgtgccaagaatttgggtgaatctcatatgtattttgggctctcctcctttgaggcacacttccttcaagtatttccttcttaactttttttttttttttttttgacacagagtcttgctctgtcacccaggctggagtgcagtggcatgatctcagctcactgcaaccttctgcgcctcctgggttcaagcgattctgtgcctcagcctcccaagtagctgggattacaggcgcccaccaccatgcctggctaatttttgtatttttagtagtgatggggtttcaccatgttggccaggctggtcttgaactcctgacctcaggtgatccatccaccttggcctcctaaagtgctgggattacaggagtaagctactgcacccggccaactttctttcttcctgtccggaatgctgtcctctgatacctcaagccaatacagttgtagctttctaccacctcaatttatgcacagatttgggagttccaggcaaaacgcttccaactcacaaatatcattcatgcggtctcacaagggcagactcacctctggtttctgcctacttttgggtattcctctgtgctgttttgtgttttgctcagagtttataattgtcatctgtggaagacttactgtgaccaaattactacactactaccagaaggcagtagctcccaccttgtgtttttattttttatagtaaactgaaatagtcactcagtttgtgttgctgaagactattaacattaaggcatatcatcttaggaggagaagcttcttgatagcatagaggaaacgcaaagcctggcctcataccattagctgtcagagtccaaagtcatcagtacctctaggttacagttgtcagtgattactaaggaacacagactatgtaagaggaaaatatcacagtcctaacttgacctaacctttccttcaattaccttcaatccctagaaacaacttttgctttctcttccatggaaagaaatgttagagcttgagaatcgaatcagcattgttatcatacccacccccattgttatacccaccccccaaaattctccttaaaccacctccttaaatgcatagatcatgctcatacagaagcctaacagttcagtagtaatcggatgatagatgtgcatgcgggtgctcagaaggcatattgcatatggcagggggtagggaacccagtcttgccatttttttagctgtgtggtcttgagaattttttttaactgctctaagccacagttttctcatctgtaaatttgggataatagtatctattttgtagggttgttaagaaagttaaatttttaaagtatagaaagtacctatcatactgttgctaacagaagactctcaagaattctgtttcctcccctgcttccttaagatctgtatacaatgcacttgaggtctctaccattaaccacttgaaattccagttggaggaaaagtcttaccagcaaaaagaaattccccaaatttatccacatcagtaatagttgtctagatacttgtcactcacccagagtgaccctgaacatggcatcttcagttcagaatttctgaggactgcttcaatttcctacagtttcatggaaactatacttcataggattcctggtgcaagaccacttttcaatgcagtcctccaatttacaggatcatccaagaaataagtccctttaaatcatctagtatccagatgagaaaacctgtgacatcataacttccatcgtcacttccttaggctaatgaattaatgctgtttgcattcacctgtcctaagatgaaattcatgcaaacctgattgcattgcccccaaaactggacaaaagcttccaacctgcccagggcttttcattcattttatcttccataaaaggcaaccatcgttgaaccactttagtgcccactgagaaaagaccttccaaggtgttggatctaccagtgaacatctgcttctcagaatgtcaagcagttattgactttttgctttgtgcgagcacattgcaatgttctgtttcttatcatgggcacttcgcctaaagtgttggagccgtgcttatccacaaaatgagaggtggccctgaggctctaattacttaccactgaagaacaatgtcatcgcaggaggaacaacccacaaactgtctgcacaggagtccagctgctccccaactatctgtgcaagcctgtccctacaaactacctgcacaaggctatgggggatttatttctaatgatgaaccagtccccgggacccatgaaggagacttgcctttagtgcttagaactaaaaatcagatgtttgccagtgagtgcagacaggcagtactgaatccttccctgaaatgcctccctgctcattgcagattaggttgagccaccctcatattaagttatcacttggattcattcactcattcgatgcttattgagggtctacctgtataaagacagcagtgaacaaaatagccactggccctgcctggagtagcttatattatagtgcagtgagacagataataaacaaatggataaatataatatcatgtagtgataagtgctgaggaagaaaataacagagaagccgaagacaggtgcagtgcctcaggcctatagtcctagctgaggcaggaagatcccttgagcccaagagctcaaggctgcaggtgagctaggattgcaccactgcactccagcctgggcaacagagtgagaccctgtctctaaaaataaagagagaaagtaaagaaaataatagagtaggatcaaaggctagaaagtgagggagtcaaggagttatttattgcagagtgcttaagaaacccttcccagtaagatagtatttgagcagagacctgaagaccatgcacacaccttagagaagtgtgtctggtggaggctgcagtaagggcaaatgtctgcagcaggagcatccttgttgaatttgaggaatgacaaggggaaaatgaggcaggagcagagagagcaggaggcagggaggcaggaagtgagcccaagaagttgaatgaggccaaatcctgtagggcccctccttcagctgatgccgaggcaatagcagcaacttcctagcaggcatcctggcttccagtcttgcttgcctccaacccattttccgcacaggtactggagtgagctccctgatgtaaccaggttgccttcctatgtaacaccctcaaatgcttccattccattgagtgcaggatcaagctcaagctccttaagctgtaccacaagggcttccttgaaactggcgccccctccagcctctcttctctgtaatttatgccccagcacaaccaagctgcctgaacttgccccactgcatggagctccttcctctcccagccatcactcacgggcctcctctgtctggaaggcacacaccaaattgattcagccagtgactcaagagtcaggaccatagaggccattcaaggtcagttactgggtgaacaaggagaaatctatcccaggcactgataataggcataaccaagaatcagctctaaggatgctattaggatccaaaaccaaggtaagaagaggcagatgctcacactgcaggaactggttaattccatcaggggatgtttcttaggacaggaacaacaagtgttgactgagtgcaggcttctcatagaagacccactacacatcacaagacatacaaaacactgtatgtatgtgttttctctaatcctcacagcacaaattatacagatgagataaatgaggttgcccaaatcctaagaagcagagctgggatccaaaccccagcaaatgcgattccacagtccatactctcatgccttccagagccgggtagggaggcaacagcagcatcaaagattgaagggtccagtggccgtgccctccatggaaccagagccacccacacacatgcatgcactcgaagaggcagctacagggaagggactgaaaacaagccttggtaccacctgcctgtgctcagttcctgggtctacatgggttagctcatggcctctctgtgcctcagttgactcagctgtaaaaacgaggcaattattactggcacataggattagaagagttaattcctgtagagcacttacacaatgtctggtgcatgttaagtgctcaattaatgttagctacactagcaagacatggcaaagtcacacgaaagtcctcttccggtccaccctgctggtccgagatcactagcacagtggtggcaagaagtggcctgaatttcagagagcacagggtcaatatttaccagaatttgcctttattctgcactggcccgaagaggtgttttctggggagtcaacccaccgctttgtgcaaccctagagtgtgtctttgtgaggaggcttcaccctgccccactcctttcctgctgctcattttcatgttcagagatggccacagcggtcactgctagtttagttcacttcctcttcattgtaaactccaagtcccaaacctaccagccctcactctcctgagccgctcagcagcccagctgatttcatcacagccataactctctagaatagctgccgttacgcaacagctcctagcgcaaaactggtacgactgtgtctactgcaatgtattcatcagtttccacaggcatttatttagtgcctactgtgtgtgtgtcatatagatgcctactgagcagtctccctccaccatgcacccccaccatcactgcagacacgcttcattgtcatccctgagtgggagccatctctttagagagggtatgagatgttttgcccgagtttgagatagtcctctcctggtgcccctctgttccgtcctctcatcccacgtcacctgcttgggctcctctctggctctagctcctgcagggtgtctcttttgcctgggtaggagacgtcctctccctcctgatgcagcctctgctgtctctccaacagtctgtgctcagcctggagatcacccccaaaggggtctgctccctcgtctcatgcctacttaactgatctgcctccagccatcaccgtctcgggtcttcatgtccctgatgctctgtagccaccaagaacatgtcctgcttcataatctcctgttgttttttaagcattccctgtcaccactcccatccctatctgttgggtatttctgcatctctgagtttcctttttttttgagacggcgtgtcactctggtgcccaggctggagtgcaatggcacgatctcggctcactgcaacctccacctcccgggttcaggtgattctcctccctcagccttctgagtaactgggactacaggcatgccaccagtcctggcaatttttgtatttttagtagagatggggtttcaccatgttggccaggctggtctcaaactcctgacctcaagtgatctgcccaccttggcctcccaaagtgctgggattacaggcatgagccactgcacccggctttccttctctcttgaacactgagttctcagccatctgtccattcataaatcttgctaccctcctcgccactgcccatccagaagtctaccaaacaattctaagaacaagtattttcacatccaactccacatttccttccacggcagctccagactctcagacaggtggcctttgaaccccagattcatgggtatttacagacaggtatcaactccaccatgaatctagagtcttgaaaatgaaaaagaaatttcaaattgtgcctctgctttcaactagtatcacatttccgctttgcaagaaacagcaagtgcagcgtgggtgaccagatagtgacctgtcattccacactcctcctgcaatgtccatcaagctggcttcaagtgagtctgcatatcatctttgctactgtgaagatgccacagagctcttgagggtacacaataggcattcagccacactcctgcgcacatgggtgcctacaacttccccatccttgtctcaggcttatttttctgtggtattaaaggatcacaaagaatttctaagtcagtcgagttctttgttgctatcattagttgtagtgcatggagggggtaaacaatgcagcttgttcttttgcctctccagttccagagatttatttactagaatttttttttttttttgccattgagttggaagaaatcaagaaagactaattactttcttttttagctgagcctaaagctggatacaagggtaaacctgggagatttacatctgagtggcggttttatgtctcagcctggaggcggtagttgaacccactgtgtctttgcatttgtttttggaaaactgtgagcatcacccccagcatggatgcctgagtggcaaccaagaccctaatctatagcatggggtccccatctggacaatgatgcaccaatgagtgccgagtagaagtggatcctatcctcctatgctcctcaggataggccaccctgtgctgtgaaaacagaccacaagaaaccccaaaagctaagtaaatgccatgatgatcttgctcatggatgctctgctcattgcagtgacttcaatggctacgagagacgctgtctcagccagggtaaggggatgcagtgactcacattggctcacagagtagacacagccgtgcctacttccagggctggggagtgtgtcctgccacgtgcccacagcgggggccaccgcgctgatgatcactgcaacttgcactcctttgaagctctggggctgctcccgcatctgcgacagtcagcatagcccctgaccacaccctttctgcactttgggttcatgggttcatgggttccatttcgttccccaacagcagtttggaaaacttctcatatatttctccaggtcacaccaacacaggagtgaaaacggagtttcatcagttgagaaggaaagaggaggggaaggaagggcaggacaggggaggggaggagaggggagacctcaagctcatgcaggtacaagggaggtgtcccctgtacactagtcccatgtcactcgccggtggctcctggtctggctgcagctgctctaccttgccatccaggtgctctgccttctctggaactttgccctgtcgtcctcagacaccagctgtaccccatcacccttgcattacatgctggtacgtgggccacagagcaatatgagcttctgtatttgtatccttgcctgacagaagttcccagaacagctggtgtgttcctgtgtctgtcattaccttctccacaccccaggacagagagacggcaacaacgtaaaaaacactccccaccatactaagtgacccctcccctcgggccctgcacctgtgcccaagaaccaactctacactccgactccttttctcaggatgggttggtctgtttattttgcccataagcctcctgcattcctcccgcacgtctcctcctggctggacctctcctgaatcccagggcagacagaggttagggtcttaaacagcccccagcatgcccataagcaatgtcagagaagccacgaggtgtctactgcaatgacaaggaagacattgttcactgcttcaatcaccggagaagacaaattccccacacagtagagcctgtctgtgcacagtgggctgaaacagacacttctcccctccagagtgctgcagaggggcctcctgcattaggagaaaagttgggccaggtgacctcctagtccttccagctctgagattcagccatgttcctcccagcagggactgattgtatttgcttcacccttgggagccagcagggtttggagcatagagaagagtgcacacacccagcgccctggctccaatcgccccagctctgtccctgacacagccttcccagctttgggggaagtcctcaggggtgcgacagggcccggactagagtgaagcaagtccggccctcagtccaggcagaaaatttagggggaccccagaaactcactaaacaagataatatttattgcggcattcttaggaaaccaacatgaaataaaaactatccacaacgaacaaaatatccaaatgtggactaaagacaggccttgtccctgtacttggacaacccacaccctagtcccagcccggccagatcctgtctttatttcacatgtggacagcagacagtttgctcatcacagattttctctgcttcgactatgtgtgatggtcttgactcctgagtatttggctgccccttttaaacgtggctgcaggcaagtgcctcgctctccccatcctggcctgggtcccgcccccccccaggcctctggagctgccctgcgctatttgctctccctctcctgtcggcttgggccgccttcatctctcatggagttccgggcaggggaccacccctgtagtagacactgtcggtgccccagctactcagccttggccttgacggttccaacgcccgtggcttctgactgcaaacacccatgactcagtctgggagctttcacaggagccaggagcatgttcacagcccacatctggggaagccggatctgccagagaattaacccctatggatgttaaaacatctcagctcctcacccctcaggagggatgatttggaatgatgtggtgcacctggccctgaggcctgtgaagggatccaggtgcaggatgtgggcctggaacacacccagagccagctgctccccttccacgctcatttcctagtcccttatcagtgcttcctgggatcacctccccagacaactgcttctggggccatctggctgagacaaaccagctgccattgccacctagggccacccatgccctgtctactgatggcccccagagcctcacaatgccaatgccacctggctgaagcccctttgctaatgcggtcaggtgggacaaggggacaatcccctctcccatccatcccatgtccctttggcccacagacggttctggtgagtgcaggaagcatcccattgcatccccagcaccaggcagggggtcttgtatgacaaacacccttcctttccactctagtccttctgtggcaggcaggtctcacagatgcaggcttccataacaactgtttcagtactgactgagtggctaagctaaatattaaaagccagcacccttacacaaaggctggaatgtaacaaaggcccaccaggagttttgcctaggcctttcctgggccttaaagcatgacaagataacaaaggaattcttaacaggacccatttaggattaaacaagttttactgggggtctgaagaaacttgccaaaccactgtgacttagcccgagacaagataagggtaatcaccccagcacctggacccattttagatcaagtaaatttactgaggcttcagaggaaggtcttcaggactcaggccttaggtatagattaaaataagttaatcgcttatgtcttttctttttttttttttttttttttcctgagatgaagtttcgctcttatcatcacccaggctggagtgcaatggtgtgatctcagctcactgcaacctctgcctcctgggttcaagcaattctcctgcctcagcctcctgagtagctaagattacaggtgcctgccaccatgtgtggctaatttttgtatttttagtagagacaggggttttaccaggttggccaggctggtctcgaactcctgatctcaggtgatctgcctgcctcggcctcccaaagtactgcaggcatgaaccactgcacccagccaacttacgtcttttttttttttttctttttttttttttgagacggagtcttgctctgtcacccaggctggagtacagtggcacgatctcagctcacttcaacctccgcctcccgggttcatgccattctcctgccttagcctcccaagtagctggaactacaggcacccgccacaacgcctaattttttttttttggagagatgggggggtttcaccgcgttagccaggatggtttcgatctcctgacctcgtgatccgcccgcctcggcttcccaaagtgctgggattacaggcgtgagccaccgcacccagcccaacttatgtctttagatgaatgtacacttatacttagatacatagcttagaaagtatgtaagctctagaaaactttgtaattttgagttcgtctggcaatattttccaggtcttttccctgtcaccagttgcagaaataaaaactctcttcctccccagttcatctgcatctcgttattgggccatgagaaatagcagcccgaccctcagtttggtccaggaatacctcttcccaggactgaggtatgataccagcgggcagccatctgggagagcagcctcccaatcccctgccaaactctcctctgtccctgtccttcccaagaggtcttctgtgagcccacccaacgaagtgatggtttcactcccaccctgaggtcagctgtctcacaaagcacaagcatagatcgccaggcattcacagaagtcccaggccctttgcttgcatgtatccaagccccccctaggatccccatggaagaatttcttagcaggatgaatccttaaaggtcaagtctggaaaggaaaattcttagatgaaatctctgagaattcttagagccccaacagtagtaacaatttcaagagagttggttttatcagaggcctagagcatgcaacagggcctggtgcttccagccaggccttgagctgcctggagctaatcaggagtcaaagaacggtggtggcctgggagtcaggagccctagcctctgagaaaactgtgcaaatttgggtctctgactcatcacctctctgagcctcagttttttcatctgtaaaaggagggggttacaccagataatccctaggggctcttctagctgtatgattttataaagaaaaaaaaaaagttcttctctttgaggagtcctgagacctgacaaaaaagcatttctaagaaatacagcggagtctcctctaggaatttttcaggattagggaaagcatcagtcagtatcgaaaggagtctatagacagtatcctagggagatggagcagggacaacaggacctggggttggggtggaacttgtatctcactcaaatactatccactgaatcttggaactaagatcagtcattttctacaaaacaggcccctggccggcatccaggactctgagaacttgggtcgctgcttttactaatgtcccatgaaggggacgccaggacagcttcccagtggatgcttcactgccctcggagtgggaggagtcccatccacccactgctggaagctgagataaccaccggctgaagggaagagttggcagaacaggagatggaacacccagctaatgtgaaaagaatgaatagattaaaaaccgcaagctacttcatcagggcccacacggcaagttaagcccgcaaatatcgatgctgaaatgtgttgagaagtctgtccaggaaggccaggaaatcaggacgctcgcaaagacctgctcggagccacagccacggcggccacctccgctaatgcggcttctgctaatgaatgcggccttcaaatctctctctccagggccctgggaggactgttaacaccatttgccagctaaagagctcaggaagatccttaagttttaaaagcaccccttccatggctttcctgccctggaggacctgggtaatgggaggtgaggaggagagccagctggcacaaccccttctcctctccacttgagctcccgtgagagatgtcacctggcagggacccaaggaaggctttagagtggggaagaaaccccccacctgcctgcctcctgccagcactgatatgggagccaggaggcagcttggcaggtcggagtcctggctggagactaggtgctggtgactttctctgtctgagctcattccaccttggccatcttggggattaaaagctgggaaaggtcttagagatcaatccaactcatttattttatggtgggcaaatagcgaggtccaaaaatgcaaagagagttgcccaaagttacactgtggggatgagaacaggaaggagaagtggagatctggcataggctaaaacccacaccaagctacacagactcagcggacctcatgagcgccaaagtgacgtgtgtcagacatgcctgtgtaagacggaagacacagtgcggattcttgtgcccaccctctgggtattcacctgctaagggaagggcactagctgaaaagtagtgggagcaaacggggatcccagccaagagggagaggagggaggagcctgaatgagtgcgcatggccacagagagagctgactacaaaagggcagtgggcttcacctctgtggcactgcacatgctgacatgaggtttggggtcccttagtgcttccagctaagtggtgtggccccaggagagtcttttatctcccttttcaggagtcctcctgtcagaggcgtttgaaccagagcaactccatcttgaataggagctgggtaaaatgaagctgagccctattgggctgcattcccaggaggttaaggcattctaatcacaagatgagataggaggtcggcacaagatacaggtcataaagactttgctgataaaacaggtgacagtaaagaagccccacaaaaacccaccaaaaccaaaatggcaatgagagtgacctctggtcatcctcagtgctacactccctccagcaccatgacactttacaaatgccctgacaacatcaggaagttaccctatatggtctaaaaaggggaggtataaataatccactcctcgtttagcatattctcaagaaataaccataaaaatgggcaaccagcagccctcagggctgctctatggagcagccaatcttttattcctgcactttcttaataaacttgcctttactttactctatgggactcgccctgaattctttcttgcatgagatcaagaaccctctcttggggtcagaatctggaccccattcctgtaacacccccttgatgctaccagatcacttacgtccataggcccacaggaaaagctggagtagagggcgaaaaacactagattttgggaaagttataagcgggttgtaaacacagactgggcaaaccagctctgtcccatctgcctccaggctgtgggcatgacgtagtcttgaagataagagtcaggaaacttaatttattagcaagaattagggtcagccacatgcaacacaaaacccaaactaacagtggcttaaccaagatggcaacttctttcttctcttatacagaacaagtgcagaggtaagtggtctcaggctagtaaggcaattctggggttatcagaactcagtatccctctgtctttctgcttctgccaccctagggctgagcttccatttccaaggccctgacttggtccaaaatggctgcgggagctccagccatcaccttccaggtagcagggagggagggagtgggaagagcatctgaaggcagtgctccctcctagctgagccgcctgccccaaagtcccatggagcatggcctttctcatcccaaggctggaatttattcccacagccacacttcattgcttagaaagccagaaaatatggtcttttatagctggttccattacctccccaaatataacagagattctctcactaaggaggaaaaggttgacagctcttgggtggaatgagcatttctgcccctccttggatcctgtttctctgtgcttctggctgtgcaactgtaacctcagttttctacatctgtgaaatgaggaaaatcaacccaggctcctcccccaaggcttgattacaaaaaagttaattaaaacaaaaagacaattctgtaactcacaggaaggaaaataagctggtgagacctggcaaacgcagcgggtgcaacgtggcctggctgtcctcacggatgtccatactccagggagtgggcaattacaggctccctgccacgaagccctttgaaacataagaattcttttgaaatatgactaattaccccccacctgactttaagactagattttaatgtatgaggctttttcaaaatgaacctcacctgtgctgctgcctttcccaagcaggctaatgatagagaacaggggcaggaagccaagcggggacgggggacaatgggcagatgagaaacagaaaatccacccaccttgccgtgcccagtaggaccagcctcctcttctccaaacttttggcctgaattcctcctaacaaggactccaatgaatcccatccctcctccttccccatctagctctggtgcaggtactaatgagtgctggagggacccagggctgcgagcagccacgcagtaccgatgtggaccgtgacggcagttctgtagttacaggttgatgctccttctcccagacacaagagcctgcaggccgtggagatgagaaggcaatgcctctgccagtggggagaaggaggaagaggatgaggtcaaggaatatgaagcagcagaggggaaagaccgtaggaggctctggtttagaaaagcaaatccagcctccaagagcaacaccctagtgaggacttcactctcctcaaaggaaagttgcaataaacagaatagaagacaggtgggaaccagcctggcaaacatggcgaaaccccgtctctactaaaaatacaaaaattagccagctgtggtggcatgcacctgtaatcccagcttcccaggagactgaggcgggagaatcactggaacccaggaagcagaggctgcagtgagccaagatcacgccactgcactccagccctgggtgacagaggatgactccgtctcaaaaaaacaaaaaacaaaaaaaatggagggaaggataatgaggagaaaggaggagaatgaagacaccgatatgactttgggcagctacaactctggctatgtctgcaaagcctggaaggatgacacaccctcgtaactgcacctcagaatgcaaaagagccagggaacatttctcctgagctcacatttctgtaaggccttagtgtaaacacctgtgagatctaggggacatgagatggtgacatgcagggattccattaggcatcatggagaacctctcagctgcaatagcatcccagagagggctacatttgaggaagttttgcaggatgaataggagttcactgaatgggccaggaggaaagagccttccgggcagaggcagcattgtgtacaaagcccaagagtgtgaaacgtcaagggatgtgcagctgatgggtctggatgaatacagatttgtagggagggagagcaactggggagaaggtaggagaaaccagtgggtccctctcctagggaatttccaagttgcccatggggtgtgggctttggccagaggtaactgggagccactgaaagataccagcaagggggaagcacattttagaacaagcactctactgcagaaaaaggattttttagcggaaagacaaattgaggaagaggtagcaaggtctggagttactgcaggagtaatggggacagaggacaacagggcctatctgaggggtgttgacatgacttggaagtatgtggagggacctaggatgacccccagatttgacttggggacagggtcgagggtgacactatgagctgggtaagaaacacagaaggaggaaggagtctgacagggaagtgatgagtttgctttttttttttttttttttttttgagacagagtctcactgtgtcacccaggctggagtgcaatggtgcaatcttggctcactgcaacctccaccttttgggttcaagcgattctcctgtctcagcctcccaagtagctgagactacgggcatgaaccaccacaccctgctaatttttttatttttagtagagacagggctttgccatgttggccaggctggtcttgaactcctaacctcaggtgatccgcctgtctcagcctcccaagtagctgagactaagggcatgaaccaccacaccctgctaattttttgtatttttagtagagacagggctttgccatgttggccaggctggtcttgaactcctaacctcaggtgatccacctgtctcagcctcccaaagtgctgggattacaggtgtgagccactgagcccgacctgagtttgcttttggatatgttgattttggagtggcaggggccttcaggtagagacaggtaggaggccattggatacatggtgcaggagtgtaggcctatgtaggtcatccatgcatgcctggctctgggatcttcgctttagtcatttaaatcatgggcctgctgtcttttcttatgcctccaggaacctggccacatctagagcagagtaagtgagccacttggggagggcagaggctgctgggatggcaagggaggttgagtgggaatccccagagaggaaacctccctccccgcagcccccgctgtcccacttgtgagacggagctctgggaccaagcagtacacccacacacaagacaaaaaacttcttcctcagagctgctcacatagggagcaaaatgctgatgagaagcaaattgtctccctaggaggcctccggttgagaagcctagagcccttctttgctataactctagaaagcacagacccacaaatgaagggagagagggaggagacaaagtagggatgatagaggcaagcaatggtgaggactcaaggagaagagggagcaaggggagggcagagaggagtcaccctggggcccagagacaggagagaccagtcagcaaaggatcaaaaccgtgactggagtccttcggaagcaaccctcccatttcctccagtgacctgggggaacagatggtctcagcagctcactctgtctgggacaggtacccactcccagctacaatctcctctgagggtctggtctaccacaacccctccaaaaagcccatctttgctgttcctgagacaaagacactgctcacaggtaatcctggccagacagatcaagcctgcctctccggtgggggagtggaaattggattcacctcgtcagacttgatacctgggactgctcagaaattgcaagactatttactcccctctccagcctgaaccctggatgcagagaaataagcccactttaagggacatcgccaaagtcaagagccctcctctgtgaccctggtttcctggcttccaagaaaggaggtggctgagtgtcagtctggaatcatccactcagaacaggcaatgctttccagagatcaggcaccgagcgttggtcccttagactcttctgaaatgagggtgtggagaggatggggaggcagaaacaaaagatgtgtgagatgagaagggaaagaccacttcccacgcatggcagcttccctctcaccattgcaaagatcatgagccaattattccatcaagttagatattagcgaatccaactttattagagcttcaaggcgcatgaaacgttaatcatggaaaccttgatattctgcattagagacttactctgggaagagaaaaaaacactttcattttcctttgaggttaatacaaggctaatttgaaagcactcggttaatgagaaagctaaaaatacctctagtacgatcacgtgcctgagtcccagcctcagtggctccagcctctctagaacacgaagccagcttcgggagggagaaacagctctggactcagaggaccagcacctacgtccccagctggttacagaggcgcacctgtcctgaggctgccagattgacagaagaaaacaggaggcagagaaagtgaggcgactccactgctctttatgtccctccatggggggacataaagattttactttgactaaaatctcaagtgctaccaggagtggggatgggttttccctgagccacacatgctccctcgcccagccctgcccacaagggcagccgtgggacagtcagcgagcagggtgctcactgtggtggaggagagggttttcctccaggggaagcaaattggacagtaaccaaccccacccccaccaccaccccccacccgcccacaggtgattgcagcagctcaccaagtgaccagaagccatcatgacaagaaagggatgaattgggcaaattgagaaggcgcggtccacttcagcctcgtgggctcctgagcacgtgcacgcacgtgtgtattaaacccagagaggaatttgatttaacagaagaaaagccctcagggctggcagctgtgggagctattaaggaggagcgaggaaggttctatgtgtctgaaaaaatgatctgaggaggtcagcgacaaagccaccgggggctgtctcctccaggatctccagttgccaggaaccaggctgctggacacgggtttgaagctgccacggacagggctctctccagactgtggcctcagaacctggactcccaaataaaccatctatgggcctctgggcttatgagatgcagagattcccttctttacagtccaggctttgcaggaaaatgaagaaagcagaagttgggggaaagtgtcatgtgctctgtcccccaccccagagacacatatggtacattttatccagagctggctcctcgcagggccctggatctgcatgcggctggggccagcacccttcctccagtgtagccagcgatccccctccatgccccctgcaatgcagctcccaccgggctgaaagatagaggtggctccatctctctctgttttgccattgtcaatggcatgcttatttcaccttttactttgagtaaaatctcaagtttaaagaacaccaggaggccaggcgtgttggctcatgcctataatcccagcacttagggaggctgaggcaggtggatcacttgaggtcaggagttcgagaccagcctggccaatatggtgaaaccttgcgtctactaaaaatacaaaaattagccaggcttggtggcgggcacctataatcctagctactcagaaggctgaggcaggagaattgcttgaagccaggaggtggaggttgcagtcagccgagatcgcactactgcactccagcctgggcaacagagcaaaaccctgtctcaaaataaataaataataaagaacaccaggagcagatatttgagtgtcagaaacacacgccaggattctcttccacctctcaccctcccccacctctcaccctccccacctccccccacctctcaccctccccacctccccccacctcaccctccccaccctctgctccaacctggaaccaggaatgaaacacagggccaggtttagccacaggcaggtgggaggcagagagatctccactctcagggtgactggcaattgcaaagaattcctcttccctggactccagggttagaaaagcaaagcccacccactccctaatccatccacctcacgtttattaaaggcctactatgtgcccaatgggatgcgagcacctccaccagggaaagcccagatcgactcacataagaagacagatactagacaaataaatccactgaacccatgcactgaggagttctggtttgttagagcaaataggaagtggttttatgtgtccctgtaactccccctaactacattccgtcaagcctcccctgcctgctctcttaaagacatctggtcaaattatatacatttcagctgtgcccagctgttagcgccatctcacccctgtatttggtccagtttgttttaaaatttctgtctttgcaaagttcaaagctccactcctcccttcccatcaccatcctcagcaggccaggcctggccatggctgttgggggttttggggcggggtgggggtcctgctctttgtactctccagccactgcctccctgcctgtctggctcccccagccatgaggggctggggagacctcaggaggctctggctggtggcctctctaagtctgaacgtccgtccctggtcccactgtgaggatgggggtcacatggaccctgaaggggcccccacagcaccattccttgatctgggaggtccagctcctgccaacttcatccccgcccccaccgcttccagccccttgcctctcacccagccagggaccttcctgggtggggcacctgcacgatggttgcatctcagctccctcccatggggttcactccatgcaaggcaggggcacacaactctgcccgccaggtgggagagcaggtgacatcctggccaccgttccctggacgcagctgccctagttattcccgtcctcagcctgcatagctaggcagtctgttggctacgctgctggcctagcggggagctgccataatgtgggagagaaagtccccctttccttcttccatagaaagggagagaacagccttccttcagaaaccacacttcagcaaggccagcttcctccagcctttggttgacttggggcaagggagatgatgatgatgatgatgatgatgatgatgatgatgataataataataataataataataataataataataataataggttccgtacccattttccaggctctctcactgactcatttaatcctcaccacaacctgtgataccagtactattgatatcttcaatttattttattttattttgagacagggtctcactctgtcacccagactggagtgtagtggtgtgatctcagctcactgcaacctccacctcccaggttcaagcgattctcctgcctcagcctcccaaatagctgggactacaggtgcctgccaccatgcccagctaattttttttttttttttttttttttttttttttaggtagagacggggttttaccatgttgtccaggttggtctcaaactcctgagctcaaggtacaaagaacaggacccccaccccaccccaaaaccccgaacagccatggccacctctgcccacctaggcctcccaaagtgctgagattacagatgtgagccactgtatccggcccaatatcttcattttagagatgagtaaactgaggcaaagggaggtgatgtggcttgctcaagatcacacagaaagtgccagtagttggctctgcagctcacacccttacccggctctgaagcagctccctgagccctgtggggtggaagcaggtggcagttttccaaacgtaagatgggtgcgctgagccctttccctctccttctgggacagctacctgcagccttgctgtcagggccgggatgcagaggggggcagcaggagcgtgtgacagggacacttacttcttccagaaatggggctgatggcacctcatggaaaagaccaggcggggcctgtagcaagaggcacttgggttgctggaggaagggagggaagggatggaacctggagtgagaggagagaggggcggagtcctgggcaggtgacagcttgtgcatagcttggaggctgtgctgaagacgtgaggtttgtcttaggagcaatggaaagttggaaggatttaagcagagctaggtcagatcctaaagactggacccaaggggaaaagtagttagcacagggccctcggctgctggaaagcaaacagggctgtctttgagccctggcctggtttgccctggcctggtttcctgcaccccatccaacctaatagaggtggggggtcttgggggagaactgaggtggacgggtcttacccagtgctttgaggaccctccctaaggtgactcagaacatctgtgcagcagcctaaggcccagcaaaggaagggactgctgaggcttcctgccttgctccttccctcggggtcctgcacgcagctctccggaatcccacccatctcgggaatacatcaagctatggaagataaccctgtaatgtgcaactaatgttctgtggacagttacacagtggtgccaccgcagactcagcaacagaggatggaaggccacccctcccgcagacagggcctgccctgccgcccagctgctctatgttggggcctcccaggaaatgagaaaggagcccaggcaccagccctgcggcatcctggaggagcccgtcctggcctgaacacaaagacagaggccagaaaaccctatggtgctcagagggggaccctcggaggccacaaacccagctagatggctgtagcagctggtgcacctgtgttaaaacctgactctgccccccactcctaacagcttccacttgccgagtgctttgccgacttcacccagttaaacctttggaacggccctgtggggaaggtgttttccccactctgtgattgaggaaacagaagcctaccacggtggtcacacatcaggactgggaattcaaactctgctctgattaattcaaggctctcagctcctcggccaggacagaaggcaagccactcatgctctctgagctcccgttactcatttgtaaaagaccgatgacagctcccgctttccagagtttgcgaggagtccgtgctggcagaaggcctggcacagggctgcaacgtggctgcatttgattggggttctccagggaaacagagccaacgggatgtgcatatctaggtctagagagatatttagttcaagggattggctcactcgattgatgagggcagcaaatccaaaatctgcagggtgggctggcaggatggaaaagggaggaagagatgcagttgagtccgaaggccgttgctggcagaactccctctttctcgggggacgtcaggctttgttctgtgcagaccttccactgattgggtgaggcccaccacaccatggaggcccatctgctttgctcagagtccatcactgtcaacgtcatctcatccaaaaaacacctgcacagcaacatccagggtaatgtttggccaactatttgggcacagccgagttgacagcaaattagccatcacaacagtgaacacacacccgtggcggccgttctgagcagagatgctgccgctgccaaaggcacccacagctggtgtttgtgtgttcatggttcatccctagggatgtgggaactcacgagtgaaaatgtggcatgcacacagctctaaaggggacccgtggcactggatacccccaggaggtgagccaagctatgcccagatcctggggccagaaggaccacttcactgacccagtgttgggggtggggactgtagaaggaggtgaccagaactgggtttaaatcctggctcttggctatgactgtggagagaacagggaacctccctgagactcagtctggcctccatgaaatgagtatagtgactgcagctgcacggggcccctgaaaggaggcaatacgtcagcggatgtaaagcacctaggctggacccagcccttgcacagacgccttcccttcccaatcttaccgaagagaggagcacgtccaaagcagaggagaaacttaattaggattggaaaaatgtgaattccaaggcttattaaattcatgatatttttacttaccatgtacccagaaatatatttagcaaagcaatttacaccatcactggctgatggattgtggttttctaagttgggttttaagatgtaaatgggctccaatcagagcactgctgggagggagaaaaccttcctctccaccgccctggtccttgggctccagcctcacctgtgcagcctcccaggacggacagatggccctgcgctcccactctccacggaggctctgctggggtggggcagggagtagagacaatagaatatcaatgataacgaccatttatccagcactcattatgtgccagatgcgggagctttacctctgctactcacttgactctcgcagcacccttgtaagataaagggccctcgggcaccttaccagctgtgtgatcttaggcaaaccacttggcgctcgctcactcgctctgtgtgtgtgtgtgtgtctgtctcttgcttgctcgctctttctccctacctcagttttcctcatctgcaaagtggaaatactaataaccttctattggagaagcccagtggctggaagttagtaaacactcagatttagaaatgggtgaaagggaaaatttcctgcccaaggtcaaccagctagtaagtagtggagtcaggattccaaagcaggtgtcggcgctaaagctcttgactgtgagtggggatagacaggcacacagacacgcagacggggcctctctcatgtccacgtgtaagcatgggaggcgggtcagtgaggtgtggctagacctaccccagcaacccacacacactcccaggaagcccaggcagggatcgcgcttctgggacccgctgacactttccagatgaggcaaggtttgctccacaaggtcccggcttcgccagggcaggccagctacaagaagacgcccagcccagcgccttccttcttgtccgtcactgtcctccctctggagtgcccttgcctgaatcaagggcttgctggagcaggacaagcagctggccttgaaattttatttactgaaataatttgcttataagccagagttttaatgcaaagccaaacatcgtcctcgctccaatgaaatcatcacaatttccaaattaatggagttgactgtacatggaacacctgactggggaaggctggtgagctcagggtcagtaaccatttcccaggagggaagtgaaatgggaatgctgctgttggggctgggatatctgggtgggagggacactggctgtggggccccaagcccgctggcaggagttgggaccagccctagagaatcctctgagcgctccccttccagcgccgcgggtgaacaggctgagcttccatgctgctgggattgtgcatggaatgcaaccacccctcccttcgcttgcttccaggactatggaaaccttacttgtgctttgagatgacacttccatcaggaagccctcccagattttcccagttgaattgctccctctacatgtggacacttctgtagctccttaagcctgaaaactggaagctcctagaggccagagacctttgtcttctgctatctcagaccttccccgtattcccacccagtgctcagcatgtttataatatgtggtggcttctccagaaatgtttgttgatttgaactgagacatattctggttgggtattttttcaattattttaagaaaaaatatatatataaacaatctaagtagaattagaaaatacgtaggcagcaagaatgctcgttagggggtgcggcatggagggcagagagcccctggccgggcctcctcctgacctccccacctgccccctgggcacctcctatagcctggtcaccaccacacatgcttcagaattagccaccagcaggatggcgaggccccaggaaccatcccttgaaggagggcaacctgctgctctggaaggttctcagagaccccagaagaggctgcccaaggcctgggaaggaccccaaattacacagatctaatgttagtggcctaagcagggtatgaagatatggactgtattctggcatctcttaatattaatagttgccagcaggggccctgggaccaggggagcaacaggggtgggaggtgggagcgcaccccaccccaccccacatctgactcattgagatgctgcacagtggccaagggacaacgttctgaccttattcccccaacaggtgggcccagtgccaaccacaagggacttgggtggacaagtgcccaactctcttcgctggcccctccgagaccaccttcttccaacactcctggcaggaagtggtggactcactttagaacccggaggactcagaggtgccctaggaatctgacttgcaaatcaactgtggagtgtttaccaggccacgccctgccgtcaggactgcattctcaacagtgaaattgggccattaccctcccttgatcttgtgctatttgtctgtaatgggtgtggggctcctcctcccagcagctgggtctctcccctgcagctggccacaggagtggcagagaccctggtggagtgactgcagctttgcagggggctaactttactccagcccctgggtactgagctctgggcttccagatgcccccaaagatgagcagaggctatggacacacatcagacatcacccaagatgtgcaccctctcatttctggggggttgcaggaacaggaaccccaaacaatgtgacttgcctttgcctcaccccatcccagggtcagctgtcttagtgtcattattcccttccagaaaagacatgaatattcctcttagcctctgcaggcactaaataataataataatagtaataataataatgataacacaaaataaagagcatttaggctgggtgtggtggctcatgcctgtaatcccggcactttggaaggctgaggtgggggtaccgcttgagcccaggaggttgaggctgcaatgggcgatgactgaaccactaaactccagcctgggcagcaaagcgagaccctgtctctcacacacacacacaaaaaacatttaatatggtttttattttcaagctataaagttaatacatagtgattgtagaatacctgaagcatgcgtagtagtataaggaacaatactaaaatcggcttatccactgctagaggtaaatactgttaacgttttggtgtattctccttgagacttttcgtgtgcgcatgtgtgtgtgtgtgcgtgtgtgtacgcgcacgaacatctatgtgtctacattataaagcacagttaggattatactatatgcacttttgagtccttctctttttaattaacatgatattatgagccttttctcacccaacagaacagcctgtaagggcccccttgccttttccacttgcgttttagcccttcagagggcaaggttccggctgtccacacccctggccaggagaaggccaacccaggaaggaaagaaagacaacggcatgcattaacccggagtcaaccgtttataaagtcaaacatttaaaaggcaaagagattcacagttaatcaaatagtcgatttgtcagagggtcgaagaagataatggcttcaattttaagttccaacaaacgcagctacctcctgtgtcctattcagtcatcccacctctctcagaactaggacatcctacagttttggccatcacggcccccggccagcctgctcgcccctccacgacaggccctttcaccctccaccctgttgattccttcatcagcattccccaccgcactttccagagcttatgccaagagagctttcctttgggagtttggtgaaatggggacatgaagcctgcctggggaggggtgtgtgtgtgtgtgtgtgtgcgcgtgtgtttgtgtgtgtagggtataggtgagcagggctaagagaccgatgtaaaaggaacagcccaaggtcaagggctgggggccagcaggaagcttccgtggcacagtcatgaattctaaataaatgaagccctctaagcatttttgttcttcttttcatcagttctcaaccaggggtgacattgtcccccagacgacatttggcaatgtctggagacatttttggttgtcacaactggggggtggatgctactggcatctggtgggtacaggccagggatgctgctctgggatgcagcatcctaccgttcacaggttgccccctgcccccaccacagagaatgggtgggccccaggtgtcaggagtgctgagaatgagggacccagcattctcttctcttctttggtctttcttgcctgcttgtaacatgcacttagacccttccagatccacaggtgcagattgtcatgaatcccaaagactagtatggggtgactcagtctaccccactgaggtcaagaaaaataagtggatggaacccgggagggatgagaacacagggtgtgggtgcagctgtgaaaatttcgtgctcatgatttcacacactctcttaatgttcttaagagcctttggggagtaaccttgggacccgcaaacactttgcccccttctcaggttcggcaaggcagggtttgcctgtaaagtagtaggacagtgtctggggagcaagctgcactttgacaattgtgtgagctgaaaagaggaggagacagagacatcctggggacagaggtggcagggtaccgtctttgaaagttaaggaggtgttttctctttggagctctgtccaccaccccagactcttgagacaagtcatagttacaaaatggccacttagcatttgtggccatctcttggatggatgttgggttgacttgagggtgttctgagatgctgtcctggtggatccacaggtatgaagcccacctctctgcatggagtaccacggccacccattgtcaattgtccaaggtggcagtgtgacctcagactggacgttggaatacagagatgagcctctggccttcacctcttggaccttccctggtttggactcctgatggcaggtttggactcctgatggcagatgccaaggtgatgtcactacctggatcatgctgggaggaagatggaagagggcccaagagcttcagagagcaaaccgtcggctgcaagctgggtcacctggctccggcagccatttttctttcctttgggttcccctgacactgagtactgttttgacaaaatgttcagcaaccaagtgtccatgcatgacctagagggttcaggagggacagccagcctgaagactttaccaatagacccagcatggaaggaggctctcagaggctggaggggaaggaagcctgacttctctctggacacaccatgcctcctctattgccagagcatgaagggaaatggtggatcctctcctagtaatacttgaagtctttgttatttgggatcatttgatttttgactcttaaaaatagtccataggccgggtgcggtggctcacgcctgtaatcccagaattttgggaggccgaggtgggtgtatcatgaggtcaggagatcgagaccatcctggctaacacggtgaaaccccgtctctactaaaaatacagcaaattagctgggcatagcagcagtcacctgtagtcccagctactcaggaggctgaggcaggagaatggcatgaccccaggaggcggagcttgcagtgagctgagattgtgccactgcactccagcctgggcgacagagcgagactccatctcaaaaaaaataataataaaaataaaaaaaaataagagtccatgaggactgaaaatggtaatgaggttacagtgaaagtgagattccaggacaggctaaaaaatcaagagaaagagactggaggagaaacctcacctcctttgtggcttttcagaaatggcctttggaagcagcagcaactccgagaatgaacttgctggccccacccagcgatggagagaacatccctttcagagcagagatgcaggatggaataggtgaagagagaaatacagattccctgaatatccgtgtcctccctcttttttcaaggactccagtatctcctggaagctcctagaaaaagtctggcattcatgtgaacttaatcagcagagactcatttacataataagcattctgtgaacacttaccatatacaaagcactgtgtcccacagctagcataaggcctggcatacagtaagtatttaatatttgtttaggatttttttctttttttagatggagtctcgctctgtagcccagactggagtacagtggcacgatctcagctcactacaacctctgcctcctgggttcaagtgattctcctgcctcagcctccctagtagctgggattataggtatgcgccaccacgcctggctaatttttatatttttagtagagacggggtttcgtcatgttggccaggctggtctcaaactcctgacctcaggtgatccgcccgcctcagcctcccaaagtgctgggatgagccaccgcacctggcgtgtttgggagatctaagggtgactgagagactatccctgcagccaaggattttataagccagacgtgccggggagtaattcaaggtggaatgaaataagtacatttcctggtgtttctttggtctcagctgctcatctggaagtgaagcagagctccctggggaccagagagtatagaaaatttctttcttgagtggaccctaagaatgaatggggagatttccccagaataaaccagctcacccttccttttccccttccgcggagctgagtctagggagcaacagcagcgccatctttctttttcggaggcagaagctgtgcactcttatcagcagtgggacagacttgggctttggacccaacagatctggagaccacccactagatgagggaagcttgggtactgagccttggttccctcttctgtaaagggagctaattttgtcttcctgcagggggtggatgtgagaattgtgaacgcaaagtggtgggcacactgcaatgggtgttcagccatctgagtctttgtcctgtgacgagtgtgcacataatagcatcgcgcgtgttaaagctctctgagcacagggcctttgtatcactgatttccccgcatcgccttagtgtacagtgcaacgttcgcccatggtaggtgctaaataaatgttgttgttgttgttttgttgttgttgttgttgtttagacagagtcttgctctgtcgcccaggctggagtgtagcggcgcgatctcgactcactgcaacctccgcctctcgggttcaagcaattctcctgcctcagcctcccaagtagctgggactacagacacccaccaccatgctcggctaattttttggtatttttagtagagacgaggtttcaccatgttggccaggctggttttgaacccctgacctcgtgatccacccgcctcagcctcccaagtagctgtgattacaggcacccaccaccacacctggctaatttttgtatttttaggagaggtgaggtttcaccatgttggccaggctggtcttgaactcctgacctcatgatccacccacctcagcctcccaaagtgctgggattataggcgtgagccatcacgcctggccataaatgtctttcaatgggatatttaaaaacatatgcatgttgttatgatatatatcttcaaaaacaaaaatcgggacatgtctgactaggacaaggacacccaaggcaggcacagatgaagcactttaagtaaggccagtcctcagacgtctggctccaagatgaacactgacaaggccgtgcgtctggctcgcccctcactcccagcagccctatttttcagggggagaaggatgaggcccagagagaaattaagatgacttgagccaggtcacaagaaatatgatattccaagaattactacttcccagcttcatccttcaatatctctctttctcttcattttgaaaagcataagtttaggtaggagaaaatctacctaagaggcaagaaaatttcccatgatgttcagcttgttcaggtgacacaccaggagatggggtgagggcagaggggtgattttgtctccaaagcaggggtcagcaaatgttttctgtaaaggaccagatggtaaattgtacaggctctgcaggcccaccatctttgtcacagcttctcagctgtgctgtggtaatgccaaagcagccctcaacaatatgtacatgaatgagcgtggctgtgttccaataaaactttatttatggacactgaaatatgaatttgatatcattttcacatgtcatagaataatactcttttgatggcttttcaaccatttgaaaaagtaaaaaaaaaaattattcttatcacgcaggctataaaaacaagatggcgagctggctttggctggtgggctgtgtttgctgaccctggctccaagcacctgtgagatggtcactggatggcatgcatccacttactccacattctcatcttcctcttggaaaaaccttctggccatggggagatgcctgttccctcagacaaaaggcttagaggtacaaacaaggcactgctttctctacgaggcttctagatcgcctgccacccgagaatgtgaatactcacatttttagcttctaatgggggtggacagccagaaatcaaactagaaatgtgtgttctaagccatctaacccccagattccagcatttggctcctccagcttgagctaagaagttgcatgaaagcagccaggcatggtggctcacgcctgtaatcccagcactttgggaggctgaggcgggtggatcacctgagctcaggagttcgagacaagcctggtcaacatggcaaaaccccatctctactaaaaatacaaaaattagccaggtgtggtgatggtcacctgtaatcccagctactcaggagactgaggcagaggaatcacttgaacctgggaggcgaaagttgcagtgagctgagatcatgccactgaactccagcctgggtgatagagtaagactctgtctcaaaaaacaaaacaaaacaaaaaaaaaagaagtgagaaaacaaataatccatgcctcgactctctttgcagagagtccaggacactggatgttggaggcctcactgctagacatagtcacagagtgcctggtgcactgcttagaatttgtcctttgtaaatttaacttgaggaagcacagaaagtttgcccttcatattgtggcataaataatcgaggagcaggtaccccaggaatgaagacagaggaagttctcagtccatagtggagtgcacaagaatgatagggaagcccaaggtttgtaaaaaccataaatatctcaacggtatgcaagggcagcctggagagcatcattatctgctcccctgactgttttaatatgctgggtagagaagcctgataaatcaccggaggctgcagggcttggagaagatttggctggagctaaaagaaggcagcccatggggaggacaactttagaataacctgaaaatacacagacacgtgcctgcagacagacactttcattcattcatccaatatttatttcctgcttatgttgttccaagcactggactagatgcagagagaatcaagttgaagaagactcagctcctgcccacacggagcctgggagcaggggaaggctggaagataccgattggaaaggtatctcaggagcatgaattattgccagggcacgggtgatccaggggtgcaccccgcagagcacctgcccccttgtggaagcccagctacctgcagcctgagcgctgagaacctgaccagcacctgcagagactgcagaatgatcctcagtgggtcctcctgagccgtcctgcctccacctcaagcccctagcagagaggatcccggccagccctgagccagtacaatgaaggagacagctgaacttaatctaccgaggctctactcctcttcctgcttggaaaatctccatccagcccgctcagcagagggaactgccccaggaagagaagagcggtgggctgaggggccgggtggagagagtacagagggaggaagctaagtaaacacccagcctctgtgctcccccgtgctgcctccgcctggtcagcaccctgtcgctggcattgatggtttcatttttctggagagaaaaagaacaaacgcggaagataattgtagtggaacggccgataagtaacgtttggtctcctttttacaaccattccctagggccatattatgataatttttcttctataactggcaaattgtataacgagtcagatgataaaccagcaagcaaggcagaaatttgcattttaatacaactgctggtatcactccccccaccccccatcccggggagatcagggcctctctgatcctaggtcacctggcaccctgccctcctgttcccttctctgagtgagtgagtctggagcactcaataaatgtagcattttcaatgaaagcataatatctgttttctccagatattatgtagcatagagattacgattcagggccctggaatctgccagctgagccctaccccagctccgacactgactgaatggctattcttagtcaggatcctgaactatgcctcagtttccttttctgcaaaacgagcatcattctactctctacactaggggtttttctgtggatgcctggtgtgcagcaaatgctcaataaatattattagtaatcgtgtcatgatggtctgtgtggaaaaaacttaagctgcttttcctctctcctcctatcacaatcaacacagaagatttctgtgcccagacatgtgggctttttccccacatgccaagcaagtcatcaattccgcagggaacatcagctaggtatcctcccaccccaattcaatcccaacaccatctacctggaaatagcatcagatcacaggttgggggctcggtcccacaagagtgacccccacatttccagtgcccatcacaagccccagtttgtttcacctgggcttctgacctgctggctgtaaacttggcttcccacaatcctcttctagggttcgattaatctgctagagcagctcacagaactcagggaaacaccacattcaccgctatattctaaaggacagatgaaggatagagatgaagagatgcacaggtgaaggtatgggggaaggagtgtggagtttccataccttcctcctgaaacctccatatgctcagctatccagaagctccccaaactctgtcctctttggccctctatggagacttcattggataggcatgattgacaaccatatagacaaccatatgtgactaaacaaaaagggtttgatcttaatactaacagactgagggggaaaacccagccaggcctgtctgttcagattcttcttggcctctctgtgcagccttccttcctccagggtatagggcaggacctcttctgaaatgggggcccctattgacttataatcagacaaggaaggtcagagaatttctttatggctggccccaagacagaaagctggggaagactggagtcctgccttggccaggtaaaaggagggcaggagaagttcagagagagagattctgtttttcgaggcctgcttttgaggcctaaagccccccaacagtataataaggaccatgggagtcatgagccaggaaccatggacaaaaaccaacatagcatagatgatattctaatatcacaggtggtgatgatgatgatgggtccaggtccatagggcagtggttcccagtcaaggccgtgttatcaagccagcctctgtccctcacctgtgctcttgtacacacccccccaccaccaccttcagggccttagcactgcctttatattcagagcctgggagtcctggaaagttcagagcacacaaggttaagggtacacaaaaagccaggtcatgggttatggaagatcacacagatgtgtacacatcaccaccagccagcccccagggcccagaactgttctggtcaccccctgggcaagtccagttttagaaattctagaatcttccagataaacgaagtggtagaaagagcactggccttggagtcacaggcttgaccttgaagccctgcaccatcacttctgtctgctcagctttggaaaagtgagtccatttcccatctatacaaggagtaacaacatctatgcttctgaggactgaaagggttaacagaagcccacgcctggcacgcaacaccagttaaatccaccaattagctgactcggaaagaaaggcgctaacaaccttggccaacttttcggtatggtggttacatttggcagggactgcccatcctttcatgcccaagagaagctaagtggtatccagaaaatcctgccaaaaacaagtcttgattattattttagctccaggagtgaagactttggggacttggcatgccctattgtttgaatttatagacatgggcccctccaataaccagccagagggaggaaaaggttgctatcacaatggattttttggagagttgtttttagaatttcctacaaccccttgagaccatcagaagttccaaaccagggctgggaattaagtttgtttctgcagtgtgatgaggcttctgtccacctcactagggtatagggggtaggagctgctttttctacacaaaatgaaccacagaccatgatgaggactttggtggtggtgccacaactgagatcattcattcattcaacaaacatgtattgacttcagtttatgttccaagcctgatctaagtgattaggatatataagaaaacaaaacagacaatacttcccaccttcatggggcttactgtgttctagtgtggagacacacacacacacacacacacacacacacaagaagtaggtgaattgtatgttggaaggcagagtgctaggataaaatagagcagaatgaggaagcacactgaatattctttttcttttttttttttgttatttttaagaaatggaatctttctctgttgcccaggctggagtgcagtggcatgatcacagctcactgcagctcactaggctcaagcaaccctcccacctcagcctcctgggtagctgggatcacaggctcaggaatgaggaaccaaacctggcttgaattttcaggagggagtgtggatagagtggattgttgtccccagttttccacaccctcctggtaacagaatctaatatcctggctcttggtgggtgacttagcagtgcccctcccacccagaggagttgtaataccttttccgccccatgatgctgggcttcgccgtgtgatttgcttgggccaacgggatgtcaactgctctgatgcatcagaggcttcatgtgtgcttgtgagccttagtttggcctcctgtgcctctgtcattgctatgtgaagagcatgcccaggtgcatgaagcctgcagtcagcctggctcagccccacccagcctgctcagcccaatcgcagccaatctgtcaaccactaacatgaaataaaatatgacttaagacttctgtactggttttctattgataccataacaaattaccacaaacctagccacttaaaacaacacaaatctatgatcccaacagctctgtgagtcagaagtccagtttggctccaggcttcagaaggacaaaatcaaggtgtctgctggttgggcttttactgggaggctgtgggaagaattttctttcaagctcattcagatcattggctaaattcagttctttgtggatgcagaactaagattctcatttttttacttgctgatggctgggagctgctctcagcatccagaggcctctctctctggttctgacatctcagaggcagcaatggcacattgaagccttctcatacttggaatctctcctttcttctgcttttccatctgctatcaagggcttgtttgattacacagggtccacctagatagcccgagtgtattgtccattctcacgctgctataagaacataactgagactgagtaatttataaaggaaagaggtttaatgggctcacagttccacatggctggggaggcctcacaatcatggcagaaggcgaaggaggagcaaaggtttgtcttacatggtggcgggcaagagggcatgtgcaggggaactgtcctttataaaaccatcagatctcatgagacttactcactatcacgagaacagcatgggaaaaacccatccccatgattcaattacccactgccaggtccctcccatgacatgtgggggttatgttaaccttgctcagacattagtgtttgacaaaaaggatgggaatgttggaaacatttttagggttctgtctaccacaacctataatgtagggttcctgggactgtttgttacacagtgctagcactacagaaacctggctctcacgatgtccaagatagctctcactgagaagtaacgcctcagcaagagccttctccaagctttctttttccttcctactggattgaacctacttcaacccagcttgagccatgtctatgacaacagtacctaggggaaggcaggacaacagtacctaggggaaggcagaacaacagagcagagcaaactgttctcccatgtccatgaagagcagagaggccccagcaatccaaaccactcacccctcaagtattgggtaagagagaaaggcactttgttatttaaaccactgcgttattgcttaaacaattgtattatagcagcttagtcttttatcaatactaatacaatatctaatacaagaactatactacaaggcaaataaaccaatggacacgagccaccttgggggaagcagcagcatgttttaccgggtaaatctcaaaaggttgcttgcgaggggtgtatggccttaacctctaaagttcacaagtacagtagacactcgtatatgaaacaatgtgcagaggatggacaaactgagtgactaagaatgaaaataaatgattcttattaaagacatgcaaaacaaagaagaagggcaggtctaagagggtcaagaggtaaggttaggagaggtaccaggagaaccaagaagccttcacggtaggatccgtatcactggctgtggctggactagatgggggatcagcttagactgaggagttgttaatccatgagggagaggctgggaggtagagagtgacatccggctgagtcctgtctgtgcctgtagcccctcagcacctaacaacaccacactgtaagcgcccaggaaacagctgtaaattgacaactcagaagaatgaatctctctcctccaccttccctagaccaggagatgcccccgacttcaatagcaaagcagagatgaacgacctcacgatgacaaacataccagaatgtcatgaggttgagtttctgttcattcaatcagcatttgcagggctgggtgcagtgtggccataaaggcggatgagctatgactcctgtcgttaagaagcttgccaacttggagatgatacaagatatgcaggtaggaaactaggataaaaaggagaaactgatgtgcaccctgacaaagtgtagagaaagcgttccgagaattccaaggagaaggaatgcttcctgcttgggagggtgggaggggcaggagaggaggccgaaggcatgaaggcaacaccgaatgaaggctaaaggcgtttgagctgaaccttgaaaaggatcaaggctggaggcatcctggcagcatgcctgtgtgagcaggctggggaggaggagggtgctgggtatggctgagatgaaggcaggtgtggggactgagttaggctggagcctgacccggttccataggtttacaccaccactgctgttccctctttctacactgaagggaaaacaatagatgtttaagtgttcaaaggtgaggactgggaggccctctccattgttccttattctgagagccttagaagccctagcttttgtggctggaagggatgttcaagacagttgcctctacctgaggctggagcccctcctgctccagcacctatggtttcctcccctgcagcccagcagcacagtcctgcagcggcaggtggggcatccctcccgtggccacaaacccacccaccctctgaagcccagcccaagggatgacttcctgttcacacacacacctgcacactctctggagaccaactggagggagggagaagatgctgaacccgagcagcaccttttgctgggcggggagccctccccgccccctttcctatcagtgtgtcctccagtgtgcccagaacagcccctttcctgttcacctcccctcccacccttcctttctaagcagggagagaagtggctgtgggctagaaaaatgcccccaaaccttccaggacaaaacttctggggaacagtgattccaatgggaggccagagctagcagctctggaactggtagcagcgcttagggagcaggatggggggaaactcacatttctagagaagtggaaggctggggaggagaggccaaagccgccctgagccaggtacatccacgtccacacacttctctcaaactctctcgtcaaaatgagacaaacaattcttccagaaacccagcccaagagatgttcatagcagatcctactgaaaagtggggatggtgggggcagacactaaataattgaaattcttgagagctgtgtggagaggcacgatattctttgctgcatgtagaaaggttaataaacacgggtgacacagggcagtggctggggactcgcggtgagcagaaacacttcccagaaggaagctcatgcctgggtttatgcccagggctggtgcgtctcacaggctcagctcctcctgctcctgcctttggtctgctagtcccagaagacacctctgaggcacccaggggcggagacagacatgcaagactttctaaatcagaaggctgggcaatgtcccgcccaaacgccctcactgggcccacagaaaggatggaatccagcctctctttatctttccttaaaaggaagaggcagaaggagaagagtgtcatgtcctgagcctctgggccagcttccaggggtctggtcccatgctggaaccattcgagatggaccctccggggctggctgtcttgccctgcatgaccctgcgtcccctcacaatgaaggctactgagtggggacacctgcaagcagccctcagcatcacagcaccctggtcagtgtcccagacaagcttggatgtggacaggtgtgcccccgcgtgctctctggtagctgggaaagccagcgtggaggtgaaggaggccctgcagggagtgaagattgcctcaggcacactgctgtccacccggagtccacattcaagcagcagtccaggcacgggcccgcttctgccctgagccccaagctgccagcacttggcagccagaacccaggatgtctcaggatgctgccgggtgctctgatctccctagcaagtgcctggcggcagtggttcaccacctaaacgctgcatccggaatctgacagggaaacaagtgcttgggtgacacccaaatgcagcatcaatacagacatgctgacatttccatctgcccctcggtccccagagtccccatgtgcaagagaagccacaggcaaaaaaagtaggtcaccccatgctggtggaacagggcaggtgcttaccagttgctcagctaactgcttctggggcagggggcattgtaaggatgcagagaataaaggagggggcaatcctctgcccgattccccaactaaccggcagctggcacgtggcagtatgcttgggtctaggccagcggttctcagccctgattttggaaggagttttatttgagaaaaaaaaaaaaaaaagataaaacacaaatgtctgagccccacctaaaaccaattaattcaaaatctctcagaaaaagagactgaagcatcaatgatatttaaaagctctccagggatcaggtgtggtggctcacacctataatcccagcactttgggaggccaaggtgggcggatcacccgaggtcaggagttcgagaccagcctgaccaacatgaagaaaccccatctttactaaaaatacaaaaaattagccgggtgtggtagtgcatgcctgtaatcccagctactcgggaggctgaggcaggagaatcgcttaaacctgggaggcagaggttgcagtgagcagagattgcgccattgtgctccagcctgggcaacaagagcaaaactctgtctcaaaaaaaaaaaaaaaaaaaaaaaaaacagaaaaaacaacaaccaccaccacctctccaggtactctgggaatgtgggaatgtgtggtcacagtggagctgctcctggtcccagcagaggatggcccttcccctctgtgatcctgaagaggagagaaggactgggagggagaaggtagttcaatgctgaaaatttctgtatttttttttatacttctgcagccttacacaaaatggtcccccatctggaatgcacccttcccctccgcttacctgcatttgactgactctccaaagcctgatttcagttcatcttcctctgatcccaggacagggtgtgccctgttcattgtctcctgtttcctgtcttattcccccaacagcccctgcactcctagagaccaaccattctctaaaatgttagagagacaaattctcagtctctatccgatacctactaagttagaaaccctgggggtggggcccagccatctgggtcttcaccagccccctgggtgaggctgctgagagttcctgttccagagtcactgtgctggtctctagacccagctactcaaagagtggtccctggaccagtggcctcggcctcacctgggaactggttagatgtgcagaatctcacaccatatcccagatctatcaaatcagaatctttatttattcatttatttatttttttgagacggagtattgctccgtcacccaggttggagtgcagtggcacaatgccagcttactgcaacccccacctcctgggttcaagagattctcctgcctcaacttcccgaatagctaggactgcaggtgcacaccaccatgcctgctactgtttgtatttttagtagaaatagggttttgtcatgttggccaggctggtcttgaactcctggcctcgactgatgtgcccgccttggcctcccgaagtgctgggattacaggtatgagccaccgcaacagccagaatctgcattttaacaggatgtgcggggggtgtgcatgctggggaaaatgtgagaagtgctgccctcttcaggaaatgagtcgacggactgcctgaaaagggaagggctggcaggcttcatcaccccccatcacgagggccatgtccccatcccccactctgttccaggagatctcagccttgatcacaagctgcaggtgctgggagcctacagagagattccagaaaggtcatccaagaaacaaatggcacagccccttatccgcatacgatcaagttgaagatgtgtctctgaggtgattgcatcccagctgaccacattctagcaccatccctgaacatgggccagtgctgaactggacccattgcaactgcccagggagcttggcttgctttataagggccacccctgaggagtaacagtctgaattgccccaagattgtcatctaagccaagcctcctgctccctcgtcctctctcctgcaatcttgtccctttcagccttccctaagcacgctctcctcaaatgcaccgagaagagtggcatcggacctcagttccgggagtgggactcaggccgggcgacagagacagagaagggagagaagaggatattgtgggatttccctgactccttcctcacgggctcccttccgttcacttcaaggaacacttgaacgcctactatgcactcagcacagtgagtcccttctgtccctgctgaactcccacattagaggttgttaaaaaaaatgtattcaatgagtttgatattcaaatacgagcttctcctgacaggttataaatagcttctttgagtccaatttgaggttttgattttttttttaatgtaagctatcagccatccatctgtgattgaatcagagagcctcttctccctcctccctgaaacccatcgtcaaaggccattactactttccctactcagagaatattgggtatggagctttaatgtcccctggggaagagaccattacaggaaaagaaaaaaaaaaaaaagacgtatttccatctctgttccaatacgcacaacctaattaagatttcataaacactcacccaacaggaaaacacatacgcacacacattcacaggcacctaaattagcaaggcaaatagagtctagattaagtggttttcttgcctgtttccgtccagttttaattaggcgtctgtcacaaggagggtgtcacgcagtggaattgtctcattttgattctttaggcttgggatgttgggttgccagatccccacacctacacctttttcctgagaatcacagctctgtcttccctgggccactctcccctccaccctcacctcccgcctgctgtttggggcccggaggaaggaggaggggcttgtccccaagcagtcccattttggtggcctccctatagcaccggctcaccaggggacttgaccctggcagacccccactgtgggactgcctggtggcagtggggacctgcatgcaccctccagatgccaggctctgggaatagaaagtacaggctccctgtgaccccctcacccctcattcccgaatgccagcagtgcagccccccagcactggtgtccaggaggctgccttgagggctgctctcagccctgccaatgtcttctctcccatccctactgctgtgctccctcatagaagaaaatacgaaagatgattcgctttctccctctttgcagatccctggggctgtttggaaaagtacattttcttcacatgtgtagaaaattaaatctgttgtgtttttgtggagcacgggaggggggagttgggggaaatgtcactcactcattcgagcagactaggggtcgggggtggaaagtaggatgggagaagctccagtcttctgaatgcctggttagggacaggctgggaggtgccagctgacccaggctgcagacttggcctcttggtcctgcctggaaaccgcctcctccttggagcaactcttctttttttttttttataactttaagtcctgggatacacgtgctacagtaaccaaaacagcacggtacgggtaccaaaacagatatatagaccaatggaacagaacagagacctcagaaataatatctcacatctacaaccatgtgatcttcgacaaacctgacaaaaacaagcaatggggaaaggattccctatttaataaatggtgctgggaaaacgggcaagctatgtgcagaaaactgaaactggatccccttccttacaccttatacaaaaattaacttaggatggattaaagacttcaatgtaaaacccgaaaccataaaaaccctagaagaaaacctaggcaataccactcaggacacaggcatgggcaaagacttcatgactaaaacagcaaaagcaattgcaacaaaagccaaaatagacaaacgggatctaattaaactaaagagcttctgcccagcaaaagaaactatcatcagagtgaacagacaacctacagactgagagaaaatgtttgcaatctacccatctggcaaaggtctgatatccagaatctagaaggaacttaaacaaatttacaaggaaaaaaaaacaaacaatcccatcaaaaactgggcaaaggatatgaagagacacttctcaaaacaagacatttatggagccaacaaacctatggagcaactcttagtttcctagaacaaagcaacagctacgcctacccggtgacatccaaactttccaagacaggctgcagggggtgcaggaagaacgaggctgggctgcagcgaatgaaaggtagtgacttgtcactgtgaagtggacccagccccctgcagcacttgtccatccgaggtcactctgcagcctccttctcctcccacaaggacgagggtttggaggcctgtgaggatgcatgtgaaggtgtggggcccgtgatcccaccggaacgatgataaaaccgaggcctaggggagactgtgagaactaagagctcactgcttcctgctcaagagacaaagagaactcgttaattaatagatccttccaccccagaaggatgagggctccaccctctctctgcccaacagaggcagatgtagaagaaatcaatgcaaaagaaaacagaggccggacacggtggctcacacctgtaatctcagcactttgggaggccaaggcaggtggatcacctgacgtcgggagtttgagaccagcctgaccaacacggcaaaatcctgtctctactaaaaatacaaagattagctgggcgtggtggcacacaactgtagtcccagcttctgctgaggaggcaggagaatcacttgaacatgggaggcagcagttgcagtgagccgagattgcaccattgcactccagcctgggtgacagagcaagactctgtctcaagaaaataaaataaaaaaaataataataatagagaacagaaaagctgttaggtcgacttgaagaagtagctgctagctcagtgataacttctcaagtgcaagtctctggatgaggtgaaacaggtgagtaataccacctgcctttgagatatttacagtccagaaggaaaattattaactctcaaagcgatgatgaccaggcagctgggtaggaggccgccatcagctctaaggaaatgtggacgtgcgatgctcaggccagcggactgaagctttgccacctccctctgccggtcacaggccctgctggaagacaggctggccacctgtacctgctgtcttctggggccaccgttctgccctccacccagggacagctgcggccaccacaaaagcagcctggctctggtgaattagctgaagtgacactcactttgtatacacatgtttacaatcagggccagatggtgaagtattggattcgtttcaacaccactccagcctgctcagctgagccgggctttgcatgtgacacgagaaccacaacacagggaaggggcaatccccttccttagacaccatccccgaatcccaggggatatttattagccctcacttaaaagtagcctcagcttaccagctgtcagaactttttttatcaaatctcctgaaattctacagacagaagaaacataacctcctctgatatcttccagtttctttcccttttttttttttaaaaaaagtaaataaatagataaagcacacttgatggaaaggagcttgcaaacgatcaccgatgacactgtttatgtcgccaaattattcatactgacaggaagagagggcagactgaacacagatcaaatggagtgattatttaccaaccgatgaggacatccttaggtgacatgacagagaaaaggggtgggggaggatgttgacaaagtgccagagacagagttgagcaagtctgcgtgtttccatctgcttcctccccaaaagaaagtggcaagggggcccttgaagacagctgcactgcagagccagaaggatgggactgccggcccccaaggagccccaggcctgagtgtccagctggcaggccaggaagaaagaggaggagggggctaaaaggtggtgatgacaagaggaatggccagtccttacccacttcatctttaccaagaaaaggtgccctcccaaccaaacctatgataaccagatataacacaagaaaaagagagagatacagaaagaaagacagagagagagagaggaagaagaagaagaagaaggaggtggaggaggagaaaaaagaaaaagagagagagagaaaggaagaaaggaaggaaggaaggaagggagggagggagggagggagggagggagggagggagggagggagggaggaaggaaggaaagaaaaagaaaagaaaagaaaagaaaagaaaagaaaagaaaagaaaagaaaagaaaagaaaagaagaccacagacaggctcttgtgatctccaatggtggaaatcatatggtctatgtagaaagtaacaaactttttggaaagaacatttgagaactcctccatcagaggaggagttcaaatccaaattgtccctctgggaggctgtagccttattcctggaatgtagccattactcaaaacaccttattttgaaatgttccttttgaaactccctttagagtgagttcgtgagaaatgttttatagcacaaagccataaccttggctgtgtgtgtagggggagggggcgaaggcgaaggtcggggtgagggtggttctggtgtcagaactctgaaattgtttgggctggagcagtttccaaatggtgactgactgaccaccaccacccccaaaacaaatctgaccccaaagaaacagctttcttaccttagagaatgttcagaggatctgtctgggctgcttcttcaaggtaattccaagaggttgctgcagaaatgatttcagctacagcaggacaactgagcatgatagtggcattacagagtggtcactacaaaaaggaaagagattatactctcttgaaagagcacgcacacacatataaagttagggcacaccttcagagattggccccagtcatctgcctctattaaatcagtcatttattcagccttgtagataagcatgggcttatctcccctgcaatcggggctcagggaagggtgggaggcagaaggaagaaatagaatgactcattaatatcacttggcctaatatgctgggactgagaagttaaatgagagaactatgggattgaaaggtagactagacagttttctgcccactattatttaggagacactgcggcaagttgagagtgagctggttttcattcctggctaatgaacgcatacgatctaagaaaggggcggctggctggaaaaaggggatgagagccttttcccattctcctttgtcaggcaagagccgaggaagttaggggtgcacctggctgggaggaggagaagaacccgaatggacatctctctgttttgctctggagagaatgaagacatcctcactctaggaacagggaaatcaacctatgggcagaaccagcttctgcctctggttgcagccattgtctggcccctgcagacaacttcctgaagtatcagaatgcttgccgaccacagagaatgacactttctggagcctgcaccacgagcatctgggtcttggggacaggcaaagcccctactgcccattgtggaaaccaatgcaaaaggagaagccctgtttcctcagatgaaggttccctcagtccaaggggcatggcttgcctggagagggagggcccaggatcgatcccatcacaacatgtccagcctgacctgtagtacttcttacttggtagctcagggctacaaaggtgaatgtaccaagaaacccaggcagacgttgtctggctttgctgacctagcctcagaagccccatcatgttacttctgccatgatcttcggtaggagaagcagccacaagtccaccagattgaagcaggaagaacagatgcatcttatctacagaaaatatctgtgctcatcctcactgcaggagcactggctgtgaccactcagagactggatctcagaagcaacatgacctccttggacatcaggacattgggaagggtgttcaggacctcaggcctctactttttagtgtttctggattttgaaataaaaatgaggacacccagaaaatatttggatttcacataaatagcaaatagcttatttaatataaatatatcccaaccatcctatgggacacacttatactaaaaatgactcattgtttatctgaaatttcagtttaacttggtgtcctgcattttatccggcgatcctctgatgttttccctccacaacacatcctctctaccctctcctgttccctacaactacagggggtggggtggaaaagataattgttcaagatcctgaagtgcatttctgtgccagccttggagagatataaaggatgatgtggccccagtaactactgctgcataacaaactaccctaaaacttagtggcttacatcaaccattttattatgcttagagatgctgcagaaatttagacagggcactgcaggaatgacttatctctgctccacaatgtctggagcttcagctgggaagactcaatggctggagataactcctggaggctggaatcatctggaggcatggtcatcacctgtctggcggttggtgctgactgtgggctgcgacctcggctggactctgcaggagcatgtgcatgtagcctcttcatgtgacctgagcttccttacatcatggcagcctctgggttgttgaacttcttacttggtagctcagggctgcaaaggtgagtgtcccaacagacccaggcagatgttatctggtttttccgacctagcctcagaagccccatcgtgttacttccaccatgatctactggtaggagaagcagtcacaagtccaccagattgaaggggggtgaacagatgcaccttctccacaacaagagcgccaaagaatctgtgggcttgttttacaaccactggaggtggagaaagtggaaggaacttgcggtgagggaggggctcacagtgagactgtggaggtagaaaatttctgatgacaacgaaggagcctggagaggttggcaggagtggagctgaaggtcagagaggttggaaatttgggaatcatgagccctgggtgcaaggaggacccggaggggctagagctgaagtcactggagatggtagtttgcagaggaaaccgctgtggaagagggaggagagacagcaccgagggagtaggagccatcaggaaacatcagaagcgctcatgtgccatgcacagctcacactgcgctttatcaaaatcggcgtctgtcaccaaaattgcgttcgactgacaccatctgcatcgatcctgctcacagtcccccaggctccctctccactcccacccatctgcacacgctgagtctctgcatcccccgtctccgctggagaacagaaacatctgcctgcagcaaagccctctctcccacctctgcccaagatgggttttggctgcctgcacagggcctgggactgtctctgcaaacctcagaacaggctcactctcaggctgagagaaacatgtggtgacttttagggagcagagagtttggtcaaaacagaggggccgagaagtgggggcactgggcagcaacgggcagcaacaggcagctgagggcccacgcacttcaatgcactccccatcctttccacccccacccctgccttgacggggagggagcaaccttcacttctgctgctctgtctggggaatggatgctcacagcagccctgctccccagcactggcctctacgaagccagcaaggcagctgggcctgactgttacggaggtgggaactggcaccacatggagatcgtgccttttgaagcctgagttaattggattttacatcatcctctcttgccttccccatctttattaaatgaccaagaggagaggagaggagcagctgatcaccgagaaggaaaagtttaggacaatggcctctttgtagaaagtaatcaatgctcagcctctcccaccacgcctcctgatgttcaggctcaaacagtgcctcgaactcagggagtgtgcaaaaagatcagttgcctttattactattcttctcattacccgaaaggtacaatctcgctcacatatgtatgtaattatgtgtgcaagcacacacgtgtgtacacatgcatacatccacacctggctaactagtgacctggatcgaccagttacctgcccaaaggaccagggcagggcctcggatctgctgtctgtggtcttgtttggatggagaattgcctgcagggtccagagctccagcagctgagccatctcaggccttagtggcccctgtctgtcctgtcttacgcatatatgtcctctcttcatgctatacgagggtttgaggatccttggagagttattccttcctctcacttttctaggtccatcatttaagggaaaagcgtggcttattcaagcggatgctggtgaaattggctagtgtgggagacagaatttgggtctaggtccttcactccctgtggcccttggccgggcctccaaggcaggcagagagaacctccccacccctgacttcaggctgcatacaatgcttctgccagtggggtaggagcagatgctaaggaaacaaaggctcagtgtgagcccacaggactggccttgccccctcagatttgagccacccccacaaaaagaacgtactctggtagcctgctggtccaaagaagatgagagactcatggagcaggatctgattccagccccagcctggagtcagggtcagcaggggttgggctggatgagctgagccccagccgacctgctgagaataaatgagcaccagaacagaggctcactggtgtgcgccagcaagattatacggctgttctacgggactctacgtgaccacgactcactggcacagtgcacctcacgctgcatacagaaatacattccagatgcacttaaaactaaaggaaaaaaaatcaaagcataaataagttttaaaaagactctcaaagctaaaaagcaatgaaatattatgaagaaacaagatggatgggtttaactgcagaagtattaaacgactctgcatcacaaagcattataagccaattgaaaacataacataacacctgctaaagattaagcttaaaaagttttagtcccatttccttaagacactaaagcaagcagccatggaggggacgtgtataaggatccaaggcagccccctttggcagaggggtgggaagaggtttttaaatacacaatgctaaaatgatgtcagggaaaaagaaatagcttctatctagaagtctaggatcaaggagagagaggaacacagtcctaaggagagaagcaggaaaagaaatcttcatccaagtttaggacacgtgaagccaccctggcatgtggtcaacccagaactacagcaaagacgccctttgtccatccaggagctgtttgacacagaagcatttccaggggcgacaagcctggcaacggctctactgtgagtaggaaccatgattggcttttgctgcagagtctagtccagcagggcccagccatagtattgatgggagcttgtacagccaggcctctgagcctttgcaccacaaattggcttccaggagagatgcttcatgtcctgggttccctgtgtactctaaggggatccccaggcactaggaggatcaaccaagggaagacacctgcaccagaactttaggtatgggccggcagatcctgtagtgcctcaaactgggaactgagggcagcatatatccttgttatgaaagcccaaattaaaatattgaaggtcctcattagtcaagaaaaattgggattggggggaaagaaagaccacaaagtgaatccacttaaaaagacggaaagaggccaggcgcagtggctcatgactgtaatcccggcactttgggaggccaaggtgggtggatcatgaggtcaagagatcgagaccatcctggccaacgtggtgaaaccctatctctactaaaaatacaaaaattagctgggcgtggtggtgcgcgcctatagtcccagccactcaggaggctgtggcaggagaattgcttgaacccagggggtggaggttgcagtgagctgagatcgtgccactgaactccagcctggtgacagagtgagactccatttaaaaaaaaaaaaagatggaaagaaataaatgtttgattgtaactttatatttagaaaaaaagacaaattatgaaagtttattttagcttacatttgacaaagtaggctattaatgcaactttttaattcttcagatgaaaaaagaacaagatattgatttgtggggacatactttttctgacgagattgtctgagagcacgtatgatccaacagccttgatttcacgtttgactttctcagcaaaatcaccaaaaggacatttttgcaaaaaaaatattggaaggcatcaattttcccaatggcctgtcttaatcctctaaaattcaaatctctctcgtttgaagtgcctgtcatttcatcagccttgtagattttcccttctgtaattgttaaccggctaagaactctgccgtatcctcattggccagtagctttgcacatgatgcacgtgattctccgtaatcactttgatcaacctcaggaaattctgcatcttttgcaaaatttgaaattgtcttgcattatcctccagagtgtttgcaacatatggccaacaggaacaggcagacccacaaatatgataatacaggctggggaaatatgctggagttaagtttaagggatgcaggaagacgggcagagtttataagagatcatgccaagaatgaattttttttttttttttttgagacagagtctcgctctgtcacccagactggagtgcaatggtgcgatgtcggctcactgcaacctctgcctgccgggttcaagcaattctcctgcctcagcatcccaagtagctgggattacaggcacgccaccatgcctggctaatttttgtatttttagtagagatggggtttccccatgttgtccaggctggtctcaaactcctggtctcaagtgatccacccacctcagcctcccaaagtgctgggatgataggcataagccatggcacccaagcaaaaatacgcccaagaatgcatatttttgtgttgcaatattataacttcaggaactgatactgtagtaatatgagaaccaaggacctctgtataagatcaagggatgctaaccacaaaatgtaaagagctcatagaaagcaatgaagaaaaaatgggcagaaacagaaaccttttctgaaaaacaagatagaaaatgaaagagagtaagaaccacagggaagaatatttattaatagcttcactgtaagcaaagaaacatataagaaagcaatatttttgccatcaaatgaatgttttctaaattataattctcaatgctgctaaggttatgaagaactaggccttctttgtgcaccgctggtagggtgtaaattggtacaggctttccagaaaggaaatgcaaaattatatccagccttaaaatcatttcaactgcatcatagttttttataaagtcccatgttgtctggacatatcctcacatcattcttaaaacgaacaaagactaaatcaaatgttgattttgagggtgtaatttttcttggggaaagaaaatcatctagtggcacaaaacaatatccttcactttgagtgaagttaattgctttttcagctctctctaaagtttgatctcccactcagaggccacttcacacaggaaggaaagcctctcccctctggagagtgcccagaggaaggggcgtgaagcccagcagagttgcatccaggcacccacgccaaatagcaagcagctcctgcctcagccaaagggctactcgcacacctgccccaggctccctccctcctcagcaaatgaaacaacagaacattacaggtttgtgcctgcactcccaggtattgagaagctggggtgtccatcaggagtccaccaacacacccacagtgaatatcttgaggtgatgggggtaggaagttttttcactttcttcttcaaactttctgtggatttgtaagtttctacaatgaaaaagcatcacatttacaatcataaaaggatatatatttttttaaggaaacagagaggaatagcattaacaaagcacagaagtagaagtgaatggaggaatgtggaggaaatgccagggcaattcagactctggaagcttcagtggcagtgagttgggtggaatcagatggcaggatcccacattacctggattgaaagatcatggctctgctgggtgcagtggctcacgcttgcaatcccagcactttgagaggctgaggtgggctgatcaactgaagtcaggagttcgagaccagcctgatcaacatggtgaaaccctgtctccactaaaaatacaaaaattagccaggtatggtggtgcacgcctgcaatctcagctactcaggaggctgaggcaggagaattgcttgaacctgggaggtagaggttgcagtgagccaagatcgcgccattgcactccagcctgggtaacagagtgagactccatcaaaaaaaaaaaaaaaaaaaaaaaaaaaagcatggatccttccaagtggtgaggagccaggcagccccagaagaaggccatgccatggaaggcacagtatggaaatggaggggaaatatactgttctttggagaaaccactgtgctgctgaatcaactcccacctgaagtgtaccttatctctggacttgcacatgcaccaattaatccctttaatttttttaagacactttgagtcaagttttctgtatgtggtaacacaaagcatgccaactggtagaatgtgaaaaggagtatggcttggagaatgttaccactggctgtcccagttaaaatagggagggtcccttaaaatgagctgagccagaatcttcctactgatggatgggatggttgtcctctctctcactggcaaaaggacaaacattttctgggtataataagggtttgggtataataagatgcacctcaggtttgaattccataaatccctcctgcagacataagagcagtttgtccagcctcagggttaaattgcctatgagggtcaggtctgcaaggaagtgtacaatgggcaacgggaggctggctgcagggatacggctcacacttaggtgtatagggatgcagtgggtattgttataatacaggttcttgttcagtaagtttggggtggtgcctaagactgcatttctaataaacacccaggccatgccaagatggccaggagctacagtaagataaaaataaataaataaataaataaaaacacatctcagccaggcatgatggctcacaactgtaaccccaacactttgggaggccaaggcagatggattgcttgaggccaggagtttgaaaccaacctgggcaacatagggagatcctgtctctacaaaaaaaaattttttttttaaattagctgggtgtggtcccacacctgccgtcctagctacttgggatgctgaggtgggaggattgctggagcctgagaaatggaggttgcagtgagccatgattgtgccactgcactccagcctgggtgtcagagcgagaccccagtctcaaaatttcaaaaaaagtaaaaaaataaaagcacacttccacatgtggcgtgcttcatccaagcatcacattaaataactcagcctctgggggtggatgttccttccccgtcctcttcccagctgtgtgaccttagcaaattacttatcctctaaactttgggtccctcacatataaaagtagggtaatgacagtgcccacctgctagggttgttataagaggataaaacacataaaggacttagcatggtgcctggcacgtagtacatactcaataaatggtagccgttgttcttattatagccgggcaaaaagtctgtgcgatctacgctttgaggaatgttacaagtaaatgccactttgttagcccagaatgaatgaaattcaattaaaatctctattggaacttctcaaagaacatcaaaggtgattctgttcatcacctgcagccaactcctgaaacttgtctctcatttccacactcctcatttctcccaccgcctccctctggtttaacatttatgtggtgcatgcacttagttcccctgactcccttgtttggcttttgttttgctttgtcggggtgtggaggggtgcttggctttattttgtgtctgcctcctcccctgattctttacaaccaggaggacccaggagcccacccagggtggaggttggttctcctctgcttgaacttggaagaacccaactcaagctgacacaatcaaaaaagggaatttttaggccaacataacttgaacctccaaggatcagtgggactggtgttgagtggctcaggacccagctcctcttcctctcctggctctgcctttctgaactggtatcatattctgcttctataagaatccccagctcacaaaccccagcccccaatacagacgaagagagtgtgcgggccctggagctcaattcaaaaggcccagaatgaaggcttgttggctctacttggtccaactcaggtcatgtgtccatccctgagccaatcccagaggccagagggtggaagccacttactggttcagcctaggccatgtgctccaccccagcctgggctggaaccagctacagcagaaccacaggcctatgaaaactgggaccttgcatatgaaaaccagaatgctgtcagagaggagaacggacactggacagttaaaaaccacacacatgtgtaatccactatgcgagaagtctctcgtccttggaaggctaggggaggagacgtagacaaagctctgcaggctgcagagtctcaggtccctgggctgagacgtcctggctgtgctcggtagggaatcactggcagtcaatgtatgatgagtctctgcatctcagagtctaggggtatattacatcccagaacactgcagcaattttttttttttttttttttttgagatggagtcttgttttgtggcccaggctggaatgcagtggcatgatcttggctcactgcaacctccacctcccgggttcaagcgattctcctgcctcagcttcctgagtagctgggattacaggcatgcaccaccacgcctggctaatttttgtatttttggtagagacgggctttcaccataatggccagactggtttcaaactcctgacctcgtgatccgtccgcctcaacctcccaaagtgctgggattataggcatgagccactgcgcccggcccactgcaggcctttaacgtgtcactcctgactcagctccccatgccatccaaccaaattcctctgcctgacatgtaaagttcttcatgacctcgctccatgcacccttctgctcccttggggtagcatcctttctccctgccaccccgcaggctcgccctcatccctgtgcctctgttccacagcccccaatcctagaagactcttcttccctccgcttatccaaatcctggtggaaatgactggtggaaatcctggtggaaatcgcgggcaagctggttctcctcccgactctcccaggagtcatgcaggcttccatgctgcaatcctccaacctcatgggtcagagggttccttgccagttggtgggatgctgctgcctgcctatgtcaaaaggagaggttgagagaatggagacgaagcatgtgaaagcttcggagagatgcctcgccaatgagaggaggccactgtatgctgaagggctgagcccaagtcctgcccacccccagcaggtttctctgattcctcagtgtccctggccctgcgtgcctctgggcctggtggtctccagctgtaacaagaccgaaagcacaacagagcgggaagggctgacagccaaccaggataacagaaagactcttttaaactgaaggcatttgagatgtggcagatgcacaaagggaccttttctgagcttcccttatctgacaaaaacagagattcccgagaagtcagctgccatcgcccccacttggggagtctccagacacgaaggcaactgacctttaacactgtgacattccaggaatactgtgtaaacgagctgtccccatcagctcaggctgccggaacaaaatgccatagaccaggtggcttaaatgacagacgtttatttctcccagttctggaggctggaagtctgtgagcagggcatcggcagggtcaggttctggtgagggctcacttcctggattacaggcagccgccttcttactatgtcctcacatggcagagagggagagacaacaggctctctggtgtctcttacaagggttctaatcccctctgagggccccgcctccatgacttcatcttgccctaatgacccctcaattgccctttatctaatcatcacactgggggttggggctccaatgcatgaatctgatagggaaacaaacattacatccatgacataagccttgtccaagcctttttttttttttttttttttttttgtgagacagagtctccttctgtcatcaggctggagtgcagtggtgcagtctcggctcactgcaacctccacctcccaggttcaagcaattctcctgcctcagcctcccaagtagccaggattacaggcacgtgccatcatgtccaactatttttttttttgtatttttagtagagacagggtttcagcatgttggccaggatggtctcgaattcctgatcttgtgatccacccacctctgcctcccaaagtgctgggattgcaggcgtgagccactgtgcccagcctgtccaagccttttatactttcccactgaagccctaaccctgccctccagccaccccatccctcccacccataaagctggtatataaatccttagccctggctgttcagagagctcctccttacagagtactcccgcatgcatgtgacataaacctgccttttctcctgttaacctgtttattcacagtcccccactacacgaccctaagttggtagaggaaaagttctcctcccaccagagccaggcaccatatgactgtgagcatggagttctcgtttccttaataaggttccggagaggacagagaatgtcttcagccctctctgtgcccacagacagcagcctcatcttcagatctccctttcctccgaacgtgcaagatcatgacctgcttccccgtcactggctcctctgatgggacctgtgttttcttttgcctaagtctcgtcccccagccagactagacttattgccagactggcccattcttttcatgcacctgacactctaacagaggctggggttgggggaaaataaatctagactttggccgggcacagtggctcacgcctgtcatctcagcaaatttggaggctgaggtgggctgatcaccggaggtcaggagttcaagaccagcctggccaacatggtgaaaccctgtctctactaaaaatacaaaaattagctggccatggtggtgggcccctctaatcccagctactcaggaggctgaggcaggagaattgcttgaacccgagaggcggaggttgcagtgagctgagatatcaccattacactccagcctagatgacagagcgagactccatctcaaaacaaaacaaaaaaataaataaattcagactccgtaaggagagactttatccaaaaggattattattgcaagggggtgagggtctaggggacactgcaatagggagaatactgtgaccaagagatctccaagtgtctcaagggcaggtttatgttgcatgcacatgggaatactctacaaggagtggctctctgaacagtcaggggtaaggatttatataccatctaaaaaaaagaggttttttttaacagaaaaaaaaaaaaacaaagctagaaagaatcagtgtggggaagtggatgaaaaggtagactgggtggacagtagacagagagagtgtttccacctgagtccagcctgttctcaggaggggtggtgtgctgagagtgggccaaagtgcaggggtctggagaaaggagagaagcagaaccaaagtttggctaagagccactttgttcccattgaccaatagggaccagcattctgctaatcacttatgaggccaagatcgagaatctgcaaggcctgtgcctgtccctgctgtacataggtaaacatgggaggcatccctgagtcttatctaagtcatgagaagaaagatgagtctttgcagcaaggtgttttccagaacaaagggtgaggggattcctgtaaccttggctcttctccaggaacaggggggctcaggtgaaattcagcatcgtcactggatacacacacacacatgcacacacaaatacagacaagaaagcctcatttttagagcttcctgtagttgctgttgtgtgtttttaatctacagacacaaatctgaatctctcaatgagggcagactgaacccttgtttaggggattaccctcttcacgggcctcttggttttgcaaagctggcacccacttccagcattaaaatgaagatactaagaagccagcaagtttgatatggagaacagatgctctgcatagcaatgaaaacttcctctgaaattatagctgctttaaaatataaaagtttcctctccccagggcacttcagaggattggaggcctggactctaggagggagacctggctcagacactcctggagcagggagcataaggttgaatcaaagccaaagttagggctgagatgagggaggaaggagggaaccccatggattccaggagtaggcaggccacctgtgttttcttttctgaactataattccctctgcctgcccaggcctttgggaagtctatgggtagtccagcctgtggggagctaaagggaggcacccagtggtgtcctgccaaatatttaacaactcgctctctgggagttggaaagtgggagaggaagatttctggtttgcagcatttgccaatttccgtggtgtcaatacaatcaccatagccaatttgaagctaccgagcttgagaaattcctgaaattcaacaatcagcactggtatactggtatcagccagctccagcaacgcgccagtgcgcctgttacacttagggcaaaaccacatggagcagcagtggacagaagcctggggaagctggttacaagtggccaaaggagcagagcaggctgggcgcggtggctcaagcccgtaatcccagcactttgggaggccgaggtgggcggatcacgaggtcaggagatcgagaccatcctggctaacaaggtgagaccctgtctctactaaaaatacaaaaaattagccaggcgtggtggcacatgccccagctactcaggaggctgaggcaggagaaccgcttgaactcaggaggcggaggttgcagtgaagccgagattgcgccactgcactccagcctgggtgacagagagagactgtctgagagaggaaaaaaaaaaaaaaaaaaaaaggagcagagcagcaggcaagctctgataactggctgggacggcctgatctgggaatgtagaagtattcctcaggggttcccaacaatctctgcactaaggaatctgtaacagattgggtttcctgtgctcaagtggaggctgggactctagtgttacttgggaagcacaggcattaagtcctagatcctgcgtggctgacatcagcctgttagagagtgccttgcgagaccccgacccttgggtttctccagtccgtccgtgttcactggctcctgaatcatgggaggtttggcggaaggcacctgagaatatgcgtctgtgggcaggcggagcagtgtacgggtttctcgtgcaggatgggcaccctctgggtagctcagtgtgactgttagagagggtgcctcagggtggggctcctccacgtctgtatacgtgtcaacacagacagctaaatgcaaacacctttaaccaaggccagaaattgccaccactttggttacttcccttgaccacatccactagctgggcaagatggagatgatgaaccaagaagttaagaggcctcgaaatgaaaagccattcatttaatgaagtcatttcctccccgccctccagggccatgccatgaataaatttgcaatcaacatctcaagggtgcaagaaatggtgcatgactttattttctttaagtcaaattcaatctgactgcaagccgcatcccatggggatggcaagaaacaatcccgttcaatgttggggctccctccccagggtcatattgaaggagagagacatccctgcaaagtaaaactcctggggagcctgtctgtggtctacactggtcctagatgtccagcagctcttcaacatctgtgctaggttaaggcttagactgtgttgagggggaaccctggtacctgccctccaccccactttccacaacccctacccactttccacaacccctgggcatctcaggggagccagctgcagaactcaggggtgggggccatccccttcctattctgggagaatctcttctttctccacttttatctctgtccctgcaaagcctcagccctctctcttcccaatctcagccacccagcaccacgtcctccgtgagccgatcctttcacaggagtcaggaggagtgagttggactttacagcttctacctcagccctgcaagttccctaagacaaacaggcagaacgactccctgggataggggagtggaaaatacaaagaaccaaacccagacagtgtgagccttccactccagtaaaaacaacacgccaattaacatcagtgttagcctgtcctgtgtgatcaggagaagaaagggagaaggttgtagggaagagagatggagccccatcctcagaactgtgggggtggaaagcagctggtgtggtgaccacaggtgtggcctgcccatgccggtgatggctcagcaatgtcatcagggttggatagcagcacacaaagggccagaggccgcgcagggaaggggaaggctggagtcataccttctcatacaacatttgcagactcagcttttttgaggttgattccctcctcagcataccaagccccatcccagggtccatggtctaaactgtaagactcggcccggcacagtggctcatgcctgtaatcccagcactttgggaggcagaggtgggtgcatcacctgaggtcaggagttcaagagcagcctggccaacatagtgaaaccccatctctactaaaaaaaaattaaaaaaaatacaaaaattagctgggcgtggtggcacgcacctgtaatcccagctactcgggaggctgaagcaggagaatcgcttgaacccgggaggcagaggttgcagtaagccgagatggcgctactgcactccagcctggctcaataaacaaacaaacagtgagactcgcctgcagacgtgactgtttttcctttccccctcctgcctccatcatcccgctggtccgctcccaccttcctctcctggcccatcccatgccctccccagctcctgttatgctcatctctaatgcactgttaaacactaagacaaatccactggtaaagccagagacaactgggtggctgtggctgccacctccctggtgaggccagtgttaccatatgagtctgacaacattcggaccccccccttctgaaaacgttcatagtccctgctcaaggcagggtgactgccaagacccacagcatactccacctttcatcctcccagcacccccagtagcagagacaggggaacgggatggaatatctggcttcatcttaaaccccaagtccattactcggcaagcctcgatactctttctctgttagagaaattcatggcactctagacctgcctagagagttccccaaggcccccatctctgcccagaagactccagcctcaaacacagaaaaataatagaccttccctagacaccgtgtcccaggtccaggtgtgccccagtcagcttgcggagactttggggctgagcctcaggctgggcaacgatgatgataaccactgaactaaccgtgtctgccctgtgcccagtgactcttcacagctgccctgtgcctggtcactcttcacagctgctctaagactgggagcatccgcatctcccactgaggaaaggaagcccagagaaatcacctctccaaatgcacacagttcatgagccttagacaaaacctcaggcatccaatgcccttttatattgcaactttgttacaggccaggaggagggaaatgtatcacccacacacccatgggtaattagcttggattcatttaccagattagacacctcagacaagagggagcagatagagccctgaacaaataacttttcagagcaggaaagccattgaagaagactaaatggtgggggagcaggctaggaagcacccccctccccgccgcccaccgccggcatagtgagggcccaggtgcagtgcagtatacaacctgcacagctgtgtgcagaacccgggagagtcggtgcgggtgtgataggctttgcttctgtccactggggcagcgcttctcacactcgaatgtgctgccggggcctgggggatgctgttaaaatgcagattctgattcagcagatctgggctggagattgagcatctgcatttctaataagcagccagatgatatggatgctggttgatggccacacaatgagcagcaaggtttggaggcagctccaatcttcatagggttaacctgccacatggagcagacagggtatctctgcctcctcagagtcccctcctgggccatcagcaggggctacaggtgcacggcctctgatggggatttaaatccccttactgggatgctgtgtgtgattggacctcgtcacatttgccactgcaattgctggcgccagagcagcttagggaaccagagggactgaggaaagtaatatcctcacagcccggggggtgtaaataatgaaagtcagatccataagtaattactttttaattaattaggaatgatgcatagcgaaggcccagcgactgtcgggtggagtgggtgttaactttaatagccttgttcctttccctgcccaaactgatttgctgggaaaggagacagagggaaaggatcaccctgggtttgggagaccgaggagagcaaggcaggaacagagggacagtcccctcccagggctgagccccaggaaccttggccaaggtcagggaattctccccaccccgttgaaatatcttgtccctggagaaagacacgggccatgcttctcacttccaaattctttacagacttacctaattaatcttcatgcacctcctggagggagagccaagtgctccttcctcttcactcagcagaagcagagctgctggccagggagggcctgctccaagccacaggtcgggtgggtgcacagtgggtggaggatacccttcccaaaggcacacctgggaggatgggagaaggagtcaggccaggtgacctcaggagggccgagggtccgtgcggtattcctctcacccagtgtcctaagcttagtaaacccaggccctgccccctgcccaccactaactcacgaataaagcctgaaagcagggccatttgggagcatccccccacccaccacatctggaagaaattacatcattcaaaggtgttaaaggcaccgagcattccagcctctccatttgtagaggaggcaatattggatctcaaaatatgaacaccattaggcatctacaaggggtcccggttcctctcctcccctcccccagcctctaacaacactgtggaccacccccgacttccctccagttcaaccagggaggccggcagggtaggtgggaaagggacagggtaaagatttccctatgcttttgaagaaaagctgggtaaactagggtaaggccagtgaagcatttgcctccaaatttaagggggcgcccccctaaaactcagcatatttgccaggtttgtctccccggcagatgcacttgccagggtcctcaattttagactcccagggaatccctgctaaagcaacaccttcccagaggcccaggtgagaactaagttttaagcagctttgaggaaggagagtaagccagatggggagagagaggaagtcagggaaaggaaaggaagcgaagagggctaatgctcgcttagtacctgccctgccaggccaggttctttgcacacccccaaggaagacatatttgcccccatttacagggtcaactcagtttccccacctgtgcagaatgggcctgagaaaaaaaaatccatgataaacaaaatgtccaaatgttaaataaagaccagacccagccctgccctcggcctcccgcctctcactctagtcctagccctatggtaccctgtctttattttaaaatttgcatatttttttcgttgtggattgaggagctttgaattttgattttaatattgtatatcttgattacctagtttttaaaaaatccccctcccaaatctagtgcccaaggggaatgccttactcacccaacccttggtcctgtttggaagccatacagggtagtgaaaaatgaacattaagaatcagacacaaaaccaagtccagctttgccatgacacctagccaagcctcaattcctcctccataaaaatgggctactagtgccactgcaggctgatggtgagacggttaacaaatgctgaccttggcacggagcctggcatagagcagaggctcagtaacatggcagctccctcctctgcccagtccttccacaccccagacccccactgcaaaggcaactatcagtcagggacccacagagcccacccaagctgggtggggaccaccagcttctcaaaaatccttcccgggtctgtctttggcaaagggagaaatgaactgcagattcagggtgagaagggaaaactgataattgcagctgtgtcaaaccaatttgtttgtgttaactgccgccaattaaacttcttttctttctttttttaagttttaagttaccccaggtcaggctatcttagggaagtggatttctggccagacggtaagaaatgcttttatctactctcacctgaggtggaaggagaaaaataaatttcagagacactcaggagcaatgaaaagatagaaaagagctggggaggatatgtcagagagaaatgagtgactaggacagcatgacaagcccagtccccatgagcagaggggaagagagacccaggccaccttcggctggctggctactcagtgtgtggtccatggaagagctgcacgggcatcacctggggagcttgtaagaaatgcagcatctcacgccccaccccaagcccctcagtcagaatctgaattttagcaagactcctggggggatttgtatccacagtacaggtttgagagatgctggtctatcccactctgagacccacccatcctgtattgatcttccccaggcaccaacggtggaggctccttagggcatggagtcttctgggtcaccccacccatttctaaagcatctggccattcaccaagaaaggtcctctcaatggttccatatcttctgatgcaactccattccccagcagatcagtcctccactcaccgctctgctggggcttcaggaactgtcctgtggtgtctggttggatccagccgatgggaggcaggaagagagaaatgctggggaatgtattcctgactctctccctaaagggcttcaaactgaagccccttcaattgctctgctcttctccttctgctcacatctgctgggcacccccctccaaggctaagctctatgctgagctctattaacctggctccctcctcttgcctggtcaggcctaagaggcacagcggcttcctggctactgtttagcagatgcatctgatgggaataacttgatcacacctcaagaatgagcccgtatggcaggtgcacctgaatgcacgctctgaattccgagctaaggaatccatgaggggccaacccagagagtcattccttatctatgaggaacatctgagcccccagccagtctgtggaacacaggccatacaggggatcaaggcccatggttttgggttaagtgaaggtgcccaggtggagatggttaggggagggtgctaagtaaaaatgccatgtaaactgcatgcttttgtaaccagtgatggttctcccacccagcccacagccacggagctgtgcttcatcctgttgggctcactgccgctgaaccctcccctgcatgtaagcccccagcaaagccccatgtctcatctgctggctctgggtctcttctttggtctcctgaacctggtgccatccccattggaattaatagggattcagcacaacagctactccctggatgtctcattctcctcgtttccctcagccctgctgtcgaatgggttttactacttaggtgctgcaaggtcaaccgatcagcagacaactgccattgaaaaggctgtctatggtactcacaggggccacacggaaaggcaacaggcttggttttgagacagaggaaggcgacaaccatgggcaagagccttcactgtggttccttgggatgaaatgagcaaggcacagtgggcaggtgtagcattggtgagtgtgagtaatttcagcggactctgaggcatcggagccatccctagatgtctggcacccagccctggggtgtttagtgcaggcagatgtggtcagagtgtgagagcccagcaagggatggaattgagggcgtagactctggatcagttggtttgtatttgaaaggttcatatactgcctcccaagaagattcctcccgaggaagtgggtgcgggagggaaagaggaatgcaggagtctgaagcaagaggattctggcaatggctgggcgcggtggctcacacctgtaatcccagcgctttgggaggctgaggtgggcggatcatgaggtcaggagttcaagaccatcctggccaacatggtgaaacctcatctctactaaaaacacaaaaaaattagctgggtgtggtggtgcatgcctgtagtcccagctactcaggaggctgaggcaggagaatcatttgaacccaggaggcagaggttgcagtgagccgagatcgtgccactgcactccaccctggagacagagctagactccgtctcaaaaaaaaaacaaaaaaaacaaaaaaaacgactcgagcatcatccagttgctcagacatgtgcagcctatgggtgcagggctgatattaaagcactaagtgtagagaagctaggacatggctaatatgcctccctagacttctaaaatcatcctcttactaaacttttctgttaagcctttgaatgtgccagctgcttcctgcagggccctcactaaatcaaaaggcagcctatgcttacctttgaccctgttctctcctccccaagagtgtacctggattttcttcacctgggccctgggcttggtcattaactacacctgaaacagaactcgagtctctctagaataagcttttagatatgcaagcagatctaatagatattttcataggcgatttcccacctccaatacatacacaaagtgaccctggaagtattttttttctttttttggttgagatggattcttgctctgtagcccaggctggagtgcagtgttgccatctcagctcactgcaacctcagcctcccgaatttaagcaactctcctgtctcagccttccgagtagctgggattacaggtgcgtaccaccacacccagctaagttttatatttttagtagagacagagtttcatcatgttggccgggctggtctcaaactcctggcctcaagtgatccacccacctcggcctcccaaagttctgggattataggcgtgagccaccacacctggccgaccctggaagtcttatatacagctatgcacaggaaagcaggagcaagatcttctttctagtaaaaggcaagaggtcagaataggaacatcaagtcttctctgatcccccgagaaagcgggtcatcgtccctcctctgcctcccgtccatgcctgaactctgtgaccgagggcaggagtcaagaatgtgctgtgcatgctccttggagctcagaggcaatgatgatcagattcaataattattagtgatctgcatattctctacggcagatgaaataactgtacagaagagcgggcggaagggagaaaaccgtaaatgcctttctctttcagcattaaaacagcaacgctataaagcttgctgcaattaattagcactcttattagcacctttatctacccatccccacacagtgtaaatgccagagagcatcaggcagctctgagcccaggggcctgggcagggctcgggagggaggggccttcctgagttcccacgctaggggctgggaggatgtgtgtgtgttgcctagagatagctgcacctccatagaccagaagactgaatctcctgggcactgagccagtgggagtaacccagggaatcttgtgtgtgcaaagaaatgccaactgccaagtagccagggagaaagagtgacacacacacacacacacacacacacacctcctaaagtatccacgctccaagactcattgcccaggccggcttcctgatcatgtgaccaatgcagtgtcacccagggtctgcagtcagagggggccccatgcttggagtttgatcctctgaagtcaccttcttaaaacttgataattttatctttaaggccgggcacggtggctcacacctgtaatcccagcactttgaaaggctgaggcgagcagatcacctggggtcaggagttcgagaccggcctggccaacatggcaaaaccctgtctctactaaaaatacaaaaattagccaggcatggtggcgcgtgcctgtaatcccagctgctaaggaggctgaggcaggagaatagcttgagtgcgggaggcagaggttgcagtgagctgagattgtgccactgcacaccagcctgggcaacaagaacgaaactccgcctcaaaaaaaaatttttttaaaaaaggccgggcgcggtggcttacgcctgtaatcccagcactttgggaggccgaggcgggcggatcacaaggtcaggagatcgagaccatcctggctaacatggtgaaaacccgtctctactaaaaaatacaaaaacaaaaaaaaagccaggcgtggtggcgggtgcctgtagccccagctactcgggagtctaaggcaggtgaatggcatgaacctgggaggcggaggttgcagtgagccgagatcttgccattgcactccagcctgggcaacagattgagactctgtctcaaaaaaaaaaaaaaaaaccaaacaaaataaaaactatctatctatctatctttgaactcgtgattagtaagcgaagtcaatgggacagtggagcattcttgggggcttggggcccctgggtgggggcccctccctctgtttccacacctccctgggatgattctcagctgctaactccacctcctccagcaactgctgctgccctgccatccccctgtggcaaactggggtgccagagggtcattgcggaggtgtgtaccccatggaccaaattgtgaagtggggccccaagcatctgtgggcatctgcagtcaccccacagatatccccatactgaaggagggaaacttacaacaaatataaacatcatgatgggtagaagagaaagacagtaagagaaaggaacaagctttttttttcctttttgagtaaggatccctacattttcattttatttatcttttatttttgtttttttgttttgttttgtttgttggtttttattgagaccaagtctcactctattgcccaggctggaatgcagtggcccaatctcagcttactgcaacctctgcctcccaggttcaagcgattctcccgccttagcctcccaggtagctgggacttcaggcgtgtgccatcatgcccagctaatttttttatttttttttagtagagtcagggtttcactatgttggccaggctggtctcaaattcctgacctcaagtgatcctcccacctcggcctcctaaagtcctgggattacaggcgtgagccaccacacccggccccattttaaattgggctctaccaactatgtagctgagcctgcccactgctttcagggcaggtttgggggtgcttcacagggctcccccagccctctgatcagctgtgactactacgttcaatcatttgacagacacatcgaaccctgctatgtgcaaggctctggatgaggtgatatgggggatggagggatggaagtcacatacccctgaaaaaaccacaacctcagggctcgattgctccctctctgcaactgtgcatgtgtttttaaataataaatgtagagaaagagatactcatgccaatgtctcaagcctaagccctggctgacatctacttagctggggaggtgaggagagagtgacccagtgggggcaacttggtagcagttcagacccagcaggatcagcctggtccttaagtgtagagtagttcagtggtgctgccctgaggtggttaaatataaaagagctaaatcagagctagttaagttcctggttctgctacttactatgtaacttttcgagtttattaaagtctcagcttttacttttctctgcccttgaatcaagcaaacaaaaaatgtggattaaacaacatagaatgggccgggcatggtggcttatgcctgtcatcccagtactttgggaggctgaggcaggcagatcacctgaggtcaggagttcgagaccagcctggccaacatggcgaaaccccttctctactgaaaatataaaaattagcctgttgtggtggcaggagcctgtaatcccagctactcaggaagctgcaccaggaaaatggcttgaacccaggaggtagaggttgcattgagctgagatcacaccactgcacttcagcctgggcgacagagggagattctgtctcaaaaaaaaaaaaaaaaaaaaatgtagaatgtccattagcaggtgtgcagaagcaggaagagtgagggatgaggagaagccaacagagagtgcatcaaatagcatccctgctgtggcaactgacctcagttctgctggggaaccaggcagcatgggcctcggaatcgccccccagaagatcaggaggctgagacattcatccaccacctcccacccccaaggatgtcagctcccctgcatttctgggctgccatgcactccaggtggcaaccccagcagctggaggaaaaatccagaatataaaaggaaagcacgcgatggtgccagccgtgggagcttgtgagtgtacctggacactgcccaccacagctagggctgaaattccaagtcagctggaggatatgacacaggacaccaaaccatctgcttccaaggcccagctatgacagggagctggccggcgggtggggcccaggcctcctcagggtggttacatacaacaggatggaggcgagaggttgcagcagggcaggcaagagccagcactcaccagtggagaggaggagcccacgcctgtcctagagcgagccccggcaccaactccagcaacatcatcctcaggttttccagagcctggtgttcaggcccctccttggaacacctgtggggactgggagggcagcccagcaaggccccactgatcaacgcggagacttccctgctgggtctagttgattttcacccagctttctgggagtagagctgttcccagagcttccctaagcttgtgcccagatggcaaatcatgatcctgcgaaacagaaggagaaatggtgcgcacatgtgagcaggtgaatggatgcggggccgaggagccttgcctgagtgcaggacggctgggctccaccctcagctctgcccccaccacgctgtgtgatgtcccaagagcttgtgacaagagctaacactgattgagcactcactctttgccaggcactaccctgggcgccttacaagggcgaatccatttaatctctgcatcgtctctacccccactttacagattagcagcctgcagaatagagacgttaattggtttgcctaaggggacagctgggatccagagccctgtctgatgcaaaggcacattcttctctgtaaaatgggcccaaagacctctgctctgataactgcactgggctttggcctttagtgaaatcagcaagtggaaagtgattggaaaggagaacgcagaccacaccacacaggcaaagaaccacagtgtgtgctgacaatggagttccgcctgagcagaaagagaatggaaagcgagaaatggaagacaaacctcagcagacttccaggcattgggttcctggcttgctcctccaccaccagctactgtcaccaccctaagtctaagagtccatcacctcccattctcaccccaggggagatggaaccagtgggcacagctggtggagaagggcactgatggtgagtacagcccatcagaaggcattccccgggggatccacagccacattccccaggcttctgaaccaggacgccccagaagttacagtatgtggcttgtacgctgacgacagtggtgatacaatgacaacaggcctgcagacatccacggctctcctgcctgcccagccctggaagccagcctcagagccggctcattcagaatggccatgccctcctaggagaaacaccttcctctctctgtccctgcatggggtaaaaggatccaaaccccctaacaaagatagttcctgggcctggctgcacccaagccctagccaaacccagaggccgcccgggaccattttttaattcttttgcaatcagcactttcctttcttcatttgctggttgaataatgcagcctgtaagaaaagggccctcagcacaattctggtgctcgtttacaatggaaattgggaaaacggcgaaacgcgtactgcaaaatgcatttaaaagaagatgattcaattggatttggcagctccgatattcaggaccagaaggagaaaatctgtctatgatttgaacatgtataattaagaagaaagccttaagtaccgggtgcatttcttaagatgtcaccggctctgttgactccaggcgttttgatcagtggtgtagagcatttatttctgaaatctgaatagctatgagtgaggcgcctttttaaaaccagcactatggagccaagccctgacatggcacagctcgtcaaatggggtgaaggtagaaggagcaaggagggagagcaaaggcccctctggacccagctctgatcctcccccagggtgtacccccaaaccttgcagaccgaggttcaggcaaaattagatccatttggtgtgtcctattttggttcttctgctgctgccaatggaagtgccagcgccctgggaaccgttccatcctgaaaacagagagcttgctttgaatgttggaaatgttttaaaaaggcaactagtattgtggaaaaagccatgcagtggttaccagaggaaggaggctcaaaccccatctccaccctggctaattgtgggagcttgggcaggttacttagcctcccccagtctcagcatcctcatctctaaaatggtctaagtaatagactctccctcataagacagaacaattagacgaggttatccgtacaaatcccagtatctgacacgtgagcagtgcccactgtacgtgatttatcgttcttattattctcttcagccctctctcaagccacccaaaataactgcatgagcccaactcagctcactctctgggccctccgagagtctgcgtggaaagcaggatgtcatgaaaaacctcacttgcagtgcgagatgactcagtgagggagttgctggcagcccaaagccttctccatggagagctggaggcttcgcaggaatgactcacaggtggcacagtgggacagaaacctgaggctgagatgagtcacatgacaatagctgtcatatggcttgttggctcatcatcctaagcaggactggaatcttctgagatttctagggtcccctctcttttctctttcagatggggagaggaaagagaaggatgagaaactggtgtgagccctggatgttcttcttagaggcctggcctactccaggtagaatgtggccagactgtgtttgacaaagccaccccttccctccactccctaagctgcccgcacttttcttggggaggggaggcagggaggaaggatggggggaagtccaggggaggaaaaggaagaatctttcatgcaggaaatagttgcaggtttcataaccacacattcaggacacacctgttgcaagactaaggaggaactgatgctcagtactcccatgatgtccagcggatgggaggctaacctggctggtgtgggtcccacaatgccagagctgttggccaaccaccaggctcaccaagcaagaagaccctgcaacaggaatcagaagtcaaagagcacccagccatggacaaatgggtgataccaggagggtcccagaggtcacagcctgctggcaggctctagggttcccaatgacctccatcagatatggggggcatcacctggccttcagcaatggactgctccaaggcccctgagtgaccacactccctggggctctggccagtacctctctacacatacaggcagcccaccctgtagatgtacccagccctgattcccaaggccagcagcacggcaccgtgtgacccaaagattctagccacctggttcctagtgagaagccacagccccaagtggtctgctcatgtatcagggaagaactccttgccagcaagagttacagctggaaacatcaggcacagtctcaggccagttctgcacaggtggggaaactgaggctggccttggctcagcagagagctaaggcacagtgagaatccaacactaccgtcatgcctagttctggaccagaccatcgggccacgctgcctgcctggatgccagggtgttggagttaatgtagatggcttcaagtcctccagctctaccccttgccagctgtgcagcctttggaaagttacttagtttctctttgcttctgtttcatcacctgtaaatggggccaaagtgctttcctcagaggtgtgccaagaatctggcctggcagagcaggtactaagtaaatattcactttctttcttcttctttttttttttttttttttttttgagatggagtcttactctgtcgtccaggctggagtgtagttgcacaatcttggttcactgcaacctctgcctcccaggttcaagtgattctcctgcctcagcctcctgagtagttgagattacaggcacgtcccaccatgcccagctaatttttttgtatttttagtagagacggggtttcaccatgttagccaggatggtcttgatctcctgacctcatgatccgcctgtctcagcctcccaaagtgctggaattgcaggtgccaccatgcccggccccccttttattttctgagtttttcactggtcccatctgcttccctctccttcctcaaagctgcttaaagctcagcaacagccctgcctctgagatggctcagcctttagtgccacgcatgctcagtgatacccccgtgagtctgacggtgaggacttcggcaattgcatctgacctggaggtaaagcccagaaatataggcaaggaaatgctctgtgaatattaaggaaggtccaataacttcatcccctaaaagacgtaagaagaggcccttgggtttgccacttgactgggactcacatctctgcccccttttggctgggaatgagtatgtggccagtctggtccatgagacccaaggaatctgttgaaagtctacagaaatgaactgtcctgcctcatttaaaagagcgagggagagagtgagagaagggaggcaaggggcagcccttgctgcccctggctatctgtgcacatggatgggtgaagacagaggcttggggctgctgccgccatcttttttttttttttttgagacggatctcgctctgtcgcccaggctggagtggcacgatctcggctcactgcaacctccacctcccaggttcaagcaattctttgcctcagcctcccaaatagctgggattacaggcacatgccaccatgtctggctagtttttgtattttcagcagagatggggtttcaccatcttggccaggctggtctcaaactcttgacctcatgatccacctgcctcagcctcccaaagtgctgggattacaggtgtgagccaccgcacctggcttgttgctatcttttaatgcaaagggaagactgagaaaactgcaaagaggccggccagagccctggcatcaccacactgctgaagccaccccagagcactcgcctccagagtcttgtgtgaggaaataaatgatttaagtccgttctagctgtatgttgttacttgcagcagagcacaccccctttccaagccctaacgggcacagctatcaagtcaagagaggaatactgccagcgttggaaggttgccatgagaaggttcacatgacacctgtgaattgtgcagcagtgtgcagcatgcaaaggacgcccacaacacgtggcccctcttctctttagccaaacctaaacttcatgcctccaaaaccaactagtcctatgaggcaaaaagggctctttccggagcccagcccaggcgccgaggcagccacccagtggctgggatttagaagaagcctcactgactcagcagcaacagagcttctgcctccaggctccgaatgccactgcctgcccagaggcccagggagaccgagagcaaacaaatgagctcttcgaatggcagcgaaagtgtcaaggaagtcaaccgcagaggccatgaacatctgacccctccagaaagtgctggtgtggagaaatgctagtgcagcttcattttcagcctctgatttcattaataagataatgatgagccatttaactttgcatctgaagagtgaagcaaattacctgtgtctacattgcttaatgacggaggcactaacaggacctttgccgcctgctggaaccgaaactgacctattgcaggaggcaattttatgctcttgggtttgccacttgactgaagccattcatcaggccgggaactcaccaccctccccaacacacactccacattagctccgtgtcctctgctgcacgctgcccctctccctaacggacgcaggcttttttaacccaatgatcctgctaccattagttatttcccggacatgaaccactgggccctcattagccaactctcaggtatccaggtgtgaattttccactttggcaatgtttccccggagaagtattcatctgagccaagccatgtcctggactccatcttcccatcagcaggaaataccaacaccgcccgtggccttctgagccaaagatgatgagagaaatcaagacgcagccaaccacagaagtcttccaaaggccagagaggctcttttggatttttcattgtttcaggtccatagattttttcatttcttttaattaaagtagaagttccatacagtaaaactcacgctttctaaaagggaatggctccgagagttttcacaagtgcatacagttgtgtggccaccaagacaggcaagacacagaacagttctgtcaccccagagagttgccttgcaccttctatggtcaacctctcctcccactcccagcccctggccaccactgatctgttttctttccctatagtttggcctttgccatcatgtcatatacactgggaagccctttgattccagcgtctttcacttaatcacctgcatttaagatggatccaggcacttttgtgcatcagtagttggttctgttttggtgctgagtagaagttcactgtatgggccgggtgtggtggatcacgcctgtaatctcaacactttgggaagccaaggcgggcggataacttgaggtcaggagttcgagaccagcctggccaacatggtgaaaccccctctctactaaaaatacaaaaaattagctgggcatggtggtgggcacctgtaatcccagctactcgggaggctgaggcaggagaatcgcttgaacttgggaggcagaggttgcagtgagccgagatcacaccattgcactccagcctgggtgacaagagtgaaacaccatctcaaaaaaaaaagaagttcactgtatagacaaaccacaagctatggatgaggcccaagggtgttcactgagcacccacctaccctgagccaggtacttgaacatacattatttcaattaatctgcaggaaaaactgtgaggtaagtactcctttttttttttttttttgagatggagttttgctcttgtcgcccaggctggagtgcaatggcatgatctcggctcactgaaacctccgcctcccaggttcaagtgatcctcttgcctcagcctcctgagtagctgggatgccaggcatgcgccaccatgcccagttaattttttgtatttttagtagagacggggtttcaccatgttggtcagactggtcttgaactcccagcctctggtgatctgccggcctcagcctcccaaagtgctgggattacgggcatgagccaccacacccagccagtaggtactcctctatctccattttggaggtaagaatagggccatgcagctagaaaaagaagggatgggccagggacagccacgagcaccatggagaggccatccactccatcattcattcgttggacaagcatctcctggagccctttcgcaggacagggcacagtgctgggtgcaatggggaagcacatacagccctgcacagagggggttacagtcgaggactgtgcttccacctgccctgcagggtgagcccactggactttcttgtacctgaggctgaagacgccacatttggtgagtgtgtggcccacataaggtgatcctcctggtatgtgtagggagagaaaagactcagccttctgtaagaccctggggaatcggcagcaggaagcgcaagaaaggcgatcggagacgtgttttctcagcacatttgtgctctgaaaacaatgaaattgcaggtttcactagacagacatgccagccactgcctgcaagtaaatatagcgatccctgaggcttgctgccctccaacaccaagtctctgtcgtttggacttgggccacaaaaccacagagaggatggtggggggagtagcaggggtcgggaggaggaagtggtctaggcatcacttcctggctttttccatccctgttccaggcacatggccctgaggctcaccaacctgctggggaagatggcacccacttcatggcctgccattatcagccatacacacgcctggggtcatcctctgaccgatacagtgtaagcaacaatttgctggatgtatagatttccagggggaagaggcagcagtggctgttgtcccacagctctgcctaggggtgtgggctccagcgtttttggcctagatcataagagggaatccctaaatagaggctttcagggtggggatggagaaggctctggctcatttcctcctgagaggcccccggtagagcagtccactgggcttctgaaggctcctcaggaaagtgcacagtttgtatttgttctcagctcctagccaagtgcctggtttaataagcagcttttgagcaataatgaatgaatgaaaggaagaagggaaagagaaagacaaggagagagggggagagggagggagagaaagagaaacccctagaggcaatcctttctgagtttcttagtaaacagagaaaaatcttaagcttaccagctggagaagagcaggaatttggggttccagtgccgaacccccattctaccacctgttagctgcacaagttactttacttttcatagactcggtttccttgtctatacgacaaggatatggatacttctctctcagggtctgggggaggattacatgagatcattttagacctcagcctaatgcccggcatggaataaccgccaatcaaaagtagctattgctgctgctcttctgactttagcaaaagaggcctcctggttctggcctgaaagcagggcaggccatgccgtggccgggaccccctggtgagaatggaccctcttggagactctgacttcattcctgcccaagctgcaggacagctgtccctgctggcagctccatgtgcatctggaactctctgagcaccaggctttgtgtgtgtctggattaattgctttctccacccccgcatctctgcccacctgcaagtgggaggctgaggtgactggggacctgcaggttttggtggagcccctggcccctcaggcctgagcttgaggagagatggagaaggactttattaagatggatgtcagagctccagtcggccctcatcctgcagcttacgctaaattattaaacgtcggcaaggacgccaggggctttgccatttgttaacagatggctctcaactgaatctctgtgcatcatcttgatgtgatatgtacaggggattgggcacagcccggggatgcagcactggaggaggaaaaggcattgcggacccccgtggagactgcccaccttgtccctgcaagctcctgtcgggttcactcacctgtgtcagttttgcttcttgtccccctgctaaggggctctctgagtccagcggggcaccagacctgcccagagcagcaactgtaataattaatgttgcatgagggtctacttggtgctcagcatttccctcgcatttcttatttaatctccacagtgagcctgcaagggaggtgtcattcacatccctttataaatgagcacgtgggacccagagtggcttattgcccagtgttgcacactcactaagtgacagagccagggctaagatccatgtccctctgacatctccagcctaacctctccactgtgctgccccctgggcccctggccaccgactctgaaaccctccccagctccccttggcctgagagtgcccagggagaatcaccactggcgacttcctatgctcacatcctccctggaggcccaaaaagggaggaacagggaagaaaatgctggaacgagctcagccctcctctctggacatcccccgcttcatgtgggtaggacccagaggatgacaacgggctgcttgccaggattcgtttgctgtggtgaggcagctgtcacggtccctgccctctgccctgtccacgggtctcccgaagaggtgtccagcctgccctgtcattattatttattgtaattgctgcattttattgagcaccaagtctctggcgggcagtaggtataatgtgatcacatttaaatcattgttaaaagctttgtcataaggacagtcagtcagtgagaaaatctgatcacagcaatttggaggcccctaagactcaggaccaggaggggatccttgattttatactttgcaactgaatggaactaactgtctcagaaactccaggtagcaggtggctgactttcagatcttccaagagcctcgcgtgcccattttaatggagggacagctcgagtccagtttccccagcctgaggaggctctgtaggcaagacgcgtgtcatacatgcccatctactcacatcgagtctctcctgagtttactgcagccacaaagccctcgaaggctccatacactgaccctgaccctccctgtgacccaaggccttggcagataaggagaaggccagcaggtttctgcaagacgcctctgccctccccacctgtctcctcggagccccatctccacctctctcaggtacaatcatttctctgaagaaccttctggctctggggaagtggctgaaagcctccctggtcagcaattctcactccttctctggcttcccactctctcctctttcatcctgatcttctcattggaaactcacatcccacctgggcaaaatgaacccctgccaggcctttacccctgcaaggaggggaggctccccagggccacatcccctccccttctcccacctgcccacgggcgcttccagaaggaaccatctttaatgggtgccctcacgtcccttccaaccaccaaagggggaaaatatccttaaagcagttgcttattaacagcatctggtggcattcgcagcccaggacgtggcaaaatatagatcagagttgggaaagccgggaatcacgctgccatttgtcctattccaaatgtcattttgcgttccatcgcagcatattaccgagatgattagtggcatcaaatgacttctgaaaaatgattatgtgccattaaaaccattagtctgtccgaaaccagcacaaacaaatggcaatgggaggatgagtcattagctggggaggctgggtgacgagtagagagctgccctgtgctgggcaattagtgaggccaacaggttggagcagccaggggggttggtggagcccagagttctgcccgggctggggaagccctagggccccgcgagagcaaagggcctgtggggttcacgcttctcccagggagcatggatttgggtttgcttggagggccctgccctccccacaggctgagggcagagacatcacagccttccccagtggaggaacaggaaaatgaggctggtgcacctgcaggttactggaaacaagatgtgggaaaaaacagaggcagggccgggacatcactgcaggggtgtaggatgagcaggcagaactccaccgcagaggcccctggggggaattttttaattgactccagcaaaaaatgacaacaacaacaaaaattggcttgggaatcacaatgtaatttacgacaacaagaacacttagagaagctataatttcagagattaaaaaacattttttgaacatatactaacaaaatagctttgatgtgacagcgaaagaaaaaaaaacaagtaaaatgtttgtcatttttttttttttttgaggcagggtctcgccctgtcgcccaggctggagtgccatggcatgatcacagctcactgctaccttgaagtcctggggctcaaatgaccctcccacctcagcctcaagagcagctgggaccacaggcacgcgccaccacacctggataatttttgttttttttggaagagacatagtgaagggtctcactatgttggccaggctggtcttgaactcctggactcaagcaatcctcccacctctgcctcccaaagtgctgggattacaggcctgaggcaccacgcccagcctgagttgttgttttcgagcttgtaaaactagctgagctctgacaccaacccttggggtacccatggtgttccatgttgaattccacttgttggggcaaagatttggtttttaggagatggaaggagggaggtccccttgtcagccctccttgtcctcctcctcctccatcttcacttgtgtctaggcccactcggtggggccacatccctgcaggggccacctcaaagcttcctgggcatattctactgctggtcacgttctagaagtagtaagcaccaccccgctttatctcttcttccctgctcccctcccgtctttctttccatacattcaacgatgtgtgtggacagcctgctctccggcttgccgggtgtgcaagctcagcccagcactggccagccctgccctccagaaaggcatcatttaatcagaaagccagtaacacggacagtgggcttcatttccatgcaccaggcactgctgtcattcaccctcacctgtgaggcaggtaggattctcatctgcatttcacagatgggtaaacaggcctggagaagctcagtgctgatgctgcagacccctgagcgacaggaacccgggctgggacctgcctggttccccgcagtccttgcataatcctgatctcccttccccagggcaccggagagagagagaagcagtgatctatcagaagtccttccgagacttgcgcattgcgttccagtgccgggccagggaaccctgcaaactctgataaccacctctccatggctgtcgaggggtgccagcatgaccccacttacagggattccaagcgccctctgttgttcctggtggagagatcccgggagccctggtgagggacaggctagggtgttgcagtatggttttgtatcctcgtttggagagtctttagcgatcactgaggccccaggctcagccgtgcagactccaagccagtggtcctcagcccaaagcatgagaatgttctgggaaccttttaacagtagcaatgctgggaccccagccctgccaggttgaagaaccaccagtctgtcccacccctgcctgttacagataaggaaataagaggcttgcagaggagcggcaaccagcccgggagcaaacagctgctccgagctaaagcagatcaagaacccgaggcctccgaaaagcagcttcccatcctcctgccttccctctctcgctcccacctgccactccaaggtagcagagctgcagcagcttgacctggagaccgtccgccctgattgacaccagtcacaaccctggctgctccgagagcctctgaggcccagccccatgacagcccgcacctctgattgttgctgcctttccatctccagagccagaagaggccaccatctcaaaacggtggtggaactccaggagcccatcatcttgctctcccctcgggcctcactgggaatgacgggctcattccagagcagctcacacatgctgttcttcatctttattgaatttggctttgcggttcttgctgctttgaggggagggatggctatgacagcagcttggaagtgctgggctgaaatcattttccaccccccggcccacccgttctattagaaaaacatgaaatctcttccttccctttatttattttatgtgtttccttcttgctaagacagagagcaaagtgatgttgaacgaaggctgttagcgtcccagccacacacgtaatgaatgcttatgaggttagtttgctgaagtacatgtccagctgctaagaaagatccaacgtagccatttgtgtgaccctggcttccagacctggctgcctttacctactcctttttgactcgaaaaattagtaagatacgtaacagcctggaagttcttcaaggtgtctaacttcagtctctcctactgcagttcagtctttttgagtcaaaccaacacacattctccctgcaaaggctgatgatgcgcaagaatattaccagccatctctcttccagcaataattagtcacaagcagccccctacttggtttgggacactgatttcaaggcctgccatctgggaaatgctgagacagcatctggggtgcccagcagctcaaagcactctgtaaacatgttgacactttctccttgtctacgaaactttcctcaagaacagcccaaggacatgcatggacacagttggaacaatcagatcccacaacctccatacagactctcccgtggctctcaaacgctggggtacatcagaatcaccactgactcagtggctgttacgaactgaatgtgtgtgtcccccccccagattcatatgttgcatcctggcccccagtgtgctggtatttggaggtggagtttttggggggataatgagttaaagtcatgaaagccaggccctcataacgagatcagtgctctcataagataaaccagagaacctgctctccctctttctctctctccctgtctccctttgtttccctctttctccctttccctctttttccctctttctctgtctcactctctccctctttctccctctccctctttctctccttttctctcactctccctctttctctctccctcccctttctctctctccttctgtctccgtctttctccctttccctttctccctctctctccctttctctctctccctctttctctctctctctctccctctttcttttttttttggatgggaaggagtctcattctgtcacccaggctggagtgcagtggcacgatctcggctcactgcagccttggcctcccgggttcaagtgattctcctgcttcagcctcctgagaagctgggattacaggcatgcaccaccatgcccggctaatgtttgtgtttttatatatgtgtatacatatatattcttttttgtagagatggggtttcactatgttgcccaggctggtctcgaactcctgagctcaggcaatctgtcctcctcagcctcccaaagtgctgggattacagccatgagccaccacgcccggcctctccccctctctttctcttcctctctctctgtccctctctctctctccttatttctctctccccttctttttccccttctctctctctctccctccccatcccaccccaccccaccatgtgaggacatattgagaaggcagccctctacaaccttggaagagagcatccccaacccccgaccatgctggctccctgatctcaggctttcagcctccagaacaatgagaaaatcaatgcctgttgtttaagccccagtctgtggtctgtagttacagcagccctagctggctgagacagcaggtctggggtgagcctggggatctgtggttgctggcaagaccccaggagacactgatgctgatgcgattggcccatggactgaccacactgcgaaacacggatccagactccccaaatagggaccctcgtcttgagttggctgctgtgtgcctgagacattaggccaaggggaggagccttccaagtggaatctgaagagctcgcagactttggagtgtgacagacctgggccgaatgctgccctgtgacttcccagcagtcacttaccatgctgcctttcccatctgttaaaggggcatgaagacacctccctccaaggctggcaccggatgggatattgcatgggcacagtgcctcgtgcagtgacgacactgtttcagggtaggtttgcttgtctgttgttttggggctgagaggagggagacgggagaaggtggtcttcaggagcttggggccatattgcctaggtgcttccatcacccgcttcctgatcctggaagccctacagtccccacacgtcatcccttacatcagttcttcagtggaaccatccagaggcacaggcacctgccccttctgcagagtctcccctgaccacccagcaactgggagacaggcacaaagcatggggaagggggtgtgaactgcaactgggcaaaacccaggagagagaccctgttcatcaaggggttcacctgcctccagcccccatacagaggggaaaagcaaagaaaggcatcctcggacagctgggcattcagaaagactggccaagatatctgtcctgtgggtaagaggagaaggaggtgcaaagatctctagtatgcctcctggagggtgagctcagtgcagaccgcaggacagcctgggctctatgaagacagggccttggaccaaggctttggtacatgtggtgtattggttacctgttgctatggaatatggcttggatgttttgtcccctccaagtttcatcttaaaatgtaatccccatgttggaagctgggccttgtgggggtatttaggtcatgggagtgggtccctcatgaatgccttggtgccctccctatggcaatgcgtgagttcttgctctgctgattcactggagagctggctgtttaaaagaacctggctccctctcctctctcttgttcctgttcttgccatgtaacatgctggctccctgtcaccttccgctgtgattgtaagcttcttgaggccacaccagaagccaagcagatattggcaccatgcttctcatattgcctgcagaaccataagccaattaaacctcttttcttaataaactactcagcctcgggtattcctttgtagcaacacaaatggcctaatacactgtttgacaagttaccacacagttaatggcttaaaacaacacatcattttgatctcacagtttttgtgggccagcagccaaggcatggctcatctcggtcctctgtctcagggtctctcacaaagctgcagtcaaagtatcagctggggctggggtctcatctgaaggttcaagtagggaaggacccacatccaagctcacatgattattggcaggattcagctgcttgagggttgttagaataaaggtcccagctcctggccatgtgggcatcttcagtatggcagcctgagtcatcaaagcctgccagccaagaaggcaatagaaagactctgtaacatgacagaagttattctctcttgtaacttaatcacagaagggacatcccattactttttccatattctattggttaaaggcaagtagctgagcccatacccaaggggagagaattgcacaatgaatttcaggagaaaggggtgattgggcatcattgtagagtctccctggcacaagtttatttacaggtgtgtcctcagggagcagcagggaaggagaaaaagacaactcaaagacgtgctgtttggaattggccgtggctacaggcacccagtgctcaatcctgtaaaactaggggaacttttttttgcccagggaacaaaaggggaaagaatttaaccatcaatcagctactgacccctgaggtcaagggtggctccactgctattaacttccccatgcttccaggctgcatgtgcagggttctagagcaggctcctaggacagcccacaccatgctgtcagaaaggaacaggatacaaggggagtccgggatgggacaggtgctgagaaaggcaatcggagctcgcatagaactggttgctgcctcagtagctgaagaaagaggtccccagagaactgaagccatgtatgagacatgtctgatacaaacccgtccccaggtgtgtgtgtttacacaggcctccacctgggagacagaaggcactgcctccctgtgagcttggggaaagctaacacaatggggccacatccaaatttaacattttcttccaccgaaatgtagctctttggctgacctttttctgttgatggcaccatcatcttcctctcccagcttcacctcaaagtcgatcacctccgtggattctttgttctcctttgcaatccatgccttatggggtaggactgaccagtcatgtaacttgaggactcagtgcaaagtgaaaataaggggcctcttccaagcatgtggaccagtgcgactgcacaggttgcacttccctgaagccagccctgcctgcaggatctataacttcaggagattctccagtcacatccttaggctcttagcattctctgctgtgcctttcctcttggcacccccaccaacttatgactaaagagttttctacgcttctgtggccctgaaagaatgaacttcatccaggaccctgaaggtgaccctgttagtcctgctgcaaactccatttgccataatgatctgcccgaaacgccaccctaactcctccctgcacaggagaagagtgagtgagtgagtctgtggagatggggtatgtagtgtgcaacctgcatagctgtgcttagcaacctggagtcaaagggggacttgccaagaactaaaaatggggataagggggtcttgccaccttatgtgcccagtactagtcataagaactgactctcatatatcacttactatgttccaagtgatgtttaagctctttgtacatattaattcactgatttcattctcacagtcatcttatgagacagttactctttttattcccattttaccgaagaagcactgaggcagagaaatgtaaaaacaaaacaacaacaacaaaacactttcccaaggccatgagaccagtaccagagctgagaattgagcccaggcagtccagctctcaagtccatttccctaaccactaaccacactgaaagtgagagccttagctattggagagatcaggcgtgtgtagagaaccttcagaagcctgactacctgatgatgttatgcactgtttgtggcttggagagaaaggtgtgcatctcatttgattttttcctttactttttgttgaaattactttgggaaagtctagcctatatcaagaaagagacaaatgggcaaagggagggagatggatggatggatggatggatggatggatggatggatggatgcagagatatagagagatatagattgtgcaaaatccaggttataaagaaagggaagggggctgggaaagggtggacccctaagccaggcttaacagcagctgtagagaacaaaataaaagtaaaattaaccaacctcccaaatcagtcaaaatcctacctgatttctaaggctcaacagaattatgttcccaggaagcccctgtgaatccgatgtgagatctgtctaagaagaagtgggaggctgtggtgattgcactgtttgtctctttctagaagaaaggactgtacaccagggcctgataccctcctgagaggttgtcctgaccaacagggcagctgcattgctggggaggcagcaagctggtaaggtctcacttcccagagcagcagctggtgggttgccatgggttcaggagtccttgctgacatagagtggttgccttggggacgttgaaagaggcagccttcctggccagccctggtgagcaaaggaaaaacatcggggtggggatagtaagaggaggatcacaggccttgtggagcagcccacaaaatccctcacactagtactttattgcctataagagatgtgctgtctacacaaactcccactagctaagtagcagggagaaagcagtgggggtgaggaggaaagtacttgattgcaaccccatgcattaatctccatccaattcagtcacttgggtttgagtctcttggagcctgagtggatgaatggactgagggcagaccttgagatgtgtgccacatgggattgggtgtcagtggggaggagcatagctggctgtgttctccagccaggagggacagctgccccatacctcctgtgacttccacagtcctgtgtcttgcctgacaaagtccctaggtggtttgcctggccatcatttgtcatttgcccttgcagcaagtcacaacgtggtttctctgactgctcaagactcaaagccctcttccaccacactcaaggggtgctgaaggttaggagagcaggaccccaggctttttgcaggatgacctcaacattgcccaacctgttaaaaaaaaaaagacgactaaccacaatgactgtcctccccagtagccagcttctcagcaatccgtcagctactctaacaagtataaactgaggtcagcttggggatggaaatgttcaggcctccttcagcccaagcaggctgagcatgtgagatgtgaccacactccacctgtagctgggcaaaagctttcccctgcccctcaggtcccataacctcctagcaggctggtctcaaggccacctccagacctcccacctcccaaggctcagggaagaaagcacagcacctccctctctatccttctccctcccttcctcccccacaatcacatgagcttagatgtggatctttccccagttgagtcttcagatgagaccccagccccagataataccttgactgtagaccagcagaggtggcctcttcctccccacaactgctccctctatgtaaccaagaggcaaggcctaagcagggcaggagagggtaggggaactggagcaacacatcaaagccagtcttgatctgttaaataggagctaaagaaacttggaaaaattttttcctctcctattattttgccaagaaatctcattttgaatatcaaaagctgaacgttagctcccttcttctttctgctctcctctgtagcaacctcagtctttttcctcaaggccgctggatgctgatttaggctaagaaacaaagggaaaagtctcattaatacttttcaaacgattgctctctttctcaggtcaaagccagggagagtgaaaactaggaacagttagagataaaatttgctggactatgtattagatctagaaggctggtctagcactttactgctgcctcaaagcagttacattcctgatttgacaaccagcacacagcctgctcttcctttgagcagggcagaccccattttatgagtgcaccaaggtttctccaggtggagggaacagactcaagctaaccaagtggttgcatggctgatgaataatctagggactagctaagagttgcagcacagaagatgctgaacaaagagccagatgatcacatctgcccagggcaaagcaacacctccccgggaaacaagccgacacacccagatttgcacttctcttcttttcctggcacctcactgaccgtcccctccttcatcctgacgagggcagacgcagccatctccatgccaacatactctcaccacactgaaacgtctacatgtgcagttttttcccatgtcaattgcactctgggttggatgtgtccagtgacagctgcagaggtgctgagtgcacgggtaggtgacaggcagctcggcccaggaaggtctcctctcctctctgttcccatccatgttagccttagaaagcacatcctgtctgttgtccttctccctatgtttcgacacctatgctacctctgctgactgagttaccaataaccaggattaaacatcaccatccctgcaacaatgccagctccttttccttaagcagcttctctgtgcccaggtggaggctggatgctttccatatagttcttagaaatactcaggcgtactcttaggtgtataatgttactcccatttcatagatgtgaaaactgagaccaggatagaaaaatagctggatcaaggtcacaccactaggagacgggaccgtggtacctactttttggtctgcttaggaaactttcctatcagaagtattaaaagataattttcctaaaacaggtgagatcatgactctcatactttaacgtgttaaagattttatttgacttaatgagggaaccaggcagacgttaacaaaggagaaatctgaaaagcagaaatttatagggagtaaggaaagtggaaatgaatttacaaatagactgaaactggctttttccttagggaagagggtagtcaattgaaccgctggacaggatttatttgcatgtctatagacaagaattattttgcattgctatcagttatgtacaacctacagagccataaaatagctcaaagaccctgaaaggctaaaatcagataacatgcaaaggtatgctcaaaacaacctagttttccatcggcgacacctagtgatcttttttgcttattccaaatttccttacaggggcaagtccttggccagatctaggtgatcctggtaacttacagagaaaatcatctcagctgatgtggtctggctaaggctgccagtcacatagaggaaaaagaaaaggcagatccccagtgttactcagcatctactacatgtcaggcactgcttcaaatgcttggcatatactaattcattcaatcctcacaataacctatgagaaaggcttcgttgttgctccatcttatggatgaggacaagagtatctggccagctaaggaacttgtccaaagtcacactcaaagccagatgcaaacacggaagtcagatgccagagctgttgcttaaagctctgtgccatcctgtcttacggaacaacctggaaagaaaagcagagagaaataatgatgggcaatgacagagcaagattgcagatggggctgggggtgggttctagcccctatggctctggaacctttaggaggttctagaaggttctagagcctttcttcccttggattcctcaagcaacctcagcatccttttccgggtaccaaagacagtatctctgtatccttctggtgcttaagctcctttgagttgtacttttattttttcataaagaatcttgacttacacatctattaagtgacagaactgagtttcaaaccctcatgtgcctaaactgcatagctgcgtctctcagttttctcacctggaaatgggactattctagtacccaccctgctggattattgtgacagttgggtacactgattcagtaaagctctgaaacgaatgcctggcagctaaaggtactcaagttattaagtcagtgttatcatcagctccattttgcagatcagtacactgggacaaaagatgttatggactttgtccaagatcactcacctggcactatttatgagcaaatggcagagccagaaattgaaaccaagcagtcagcagagcctgtcggcttcacgtcgaccctgggagggccctgaagaagtcatctgcccccaccatgcccccgttctgtccagagctgagtgggtgttccgggagcctgggtcaggcttccagggcagaaggactcccagagctggagctggctcctttctcagcttgcttgtgaaagaaccacaggcaggtggggcctcccagctctgagctgcagcggccaggtgagcacagtgctctggggcagtggctcccactgagccagggtcttatgcaaatgcacctgctcccacccacctacccaggtgcctgtggaggcgccaccatatctctctacttgcgctgtctccaagtcgtcttccctgccgtctccaccatatggaggcataaatccagttaatgtgtccaaaaaagaaaaatcaaaatgtcagatctgcagagatggttcaattgaaggaatattgattgtcacagagaatagtctcactttattcacctacttagtctgctcccctaggcgcatatgaattcatcaaatatcgtcacagcgcataataacgttcattcccgcattgttgtgactgcttgggctttggtcctgctcaccgtgcctgactcaggtggggtaaggccaggggagggtgggaagggagaggaggggtttgctgacatggtttggatgtttgtcctctccaaatctcatggtgaaatgtgatccacaatgttggaggtggagcctaatggaaggtgtttgggtcctgggggcagatgcctcctgaacggcttggtgccctctctgtggtaatgagtgagttcttcttctactagttcacaggagagctggttgtttaaggaactcctcccctctctctcgttcccctctcaccatgagacatgccttctccaactttgccttccaccatgagtaaaagcttcctgaggcctcatcagaagccaagaagatgctggtgccatgcttccacagcctgcagaatgatgagccaaataaacctctttataaattacccagccccaagtattcctttatagcaacatgaaatagatgaatacagtggccaaggcatcacatcatggcattttactcaggacaagacactttgccatctagcatgtgaactgatcttccacaccaccacgtgggggagtcaggaaggagagagttattcccagttttctaggttggatccgcagagttaagcaactcatccaagatcatgctgctaataagctagaatttgaaccttggtttccaacttccaatttgggacccctttcatgccacctgccctttcctgtaaatggtgcgtctgatccagacaggactagagatgggtggagtcctctgggcttctgcatggctgtctgcgctgtggatcatgcgtccactctttgtccaggcctggacgcagactcaaggagatgccccatagctctcaatgcacgtattaaagtggaaaagcaggagacatggcttttagagactaacagctggaactgtcagaatgccacactgtagacttgacccatgacccctccgaaactgtttattgagttgacatgacaccagcacaaggtaaaggctgaagaaccctgagaaagtagcacaaaacatcacagggagcatcttagccccctgagacctgcatttccttttttgttttgttttgtttttttttttgagacagaatcttactctgtcgcccaggctagagtgcagtggtgcaatctcggctcactgcaacctctacctcccaggttcaagcgagcctcctgcctcagcctcttgagtagctgggactataggcatgcaccaccacatttggctaattttatacatatatacatatatatatatatatatatatatatatacatatatatatatatatatttttttttagtagggacgaggtttcaccatgttggtcaggctggtctcaaactcctgacctcaggtgatccacgcgcctcggcctcccaaagtgctgggattacaggcctgcgccacagtacccagcccaagacccgcatttctgaaacaccaaccaagaagaggggtcaggcagccaaagcccccaaatgcacttgtaccataagttgtggggtctctccaggcaccgtccaggaaagcacaaccctagagtatttagaccagcctttttcacagtgtgtcccaaggaacaaggggtctgaagttctgaaacaattttgcagtcaaataaatttggggaactttgggttaattaaaattaaacagattattttgatccagggtttcttggaacctccatcatcttgattttaataagaacagcccatgttgcctgtggcccaatgtgcccagcactgttccaatactaactcatttccatactgctatccccattttacagttcaggaagccaagacacagagaggaggtgacctgcccaaggccaggagttctggtgtgatgagacaagatgagcaagctagaatcagcagcgactcagaggcaggtagacaacacaacacttcccaaacttactcaactctggatctgccccatcctttgttctgtcccagagcacctcctgggactcaggttctgtggaatatttaagaactctggtttaagcagcttccctgaccggctagctcaggtagctatcagagctctgttcaacggcacacctagaagcaaatgcaagttgatttggtctctgagtagtgcctctttcttgttccccagggaagctcctgcgctgtggggggcctgaatccaaaggcaggagcccctggggaaaatccaaatttttggctggatggggaccagtgcttccacctctctatcctcttccctgggccaccttgaagcagggagctgaggaaggtgggatggactccacgctcttcctcctcatcatgctcctggctggataccagttctggaaccttccagccaaaggcagaaaggatttttccagtggttagactcagcccagaggaatagagacactaatcactttgagcagctgcccctctgtccccacctggggctcagccacacccaccataatttctgactcgatgtgatgctttggctggagtccgcaacagatgcatggagtgggagattttattcccaggagtctttgccaggagatcatccctgggagggagaggggaaatgtggcctcaatagaagaatatcaataggaaaccatggtgagaagacatagttggccagagctggcgatggagtaattaattctacttaagtaaaatgttactaataattaaacgtactaattaagaaaaattggatcagctgttgtcaatgtggcacagaagcaggagctccactgacacattccttgggcagcttcccgctgggagtggatgggactagacgcagcccacatggtcaccttggggcccaggagaaaccagaggagctgtgagctggagagtcctctgtgagaggaagccacaggcttggggacatgtctcgtaaggtgacaaatccagaaggctagggaagactccatgagaaggaaatccagaatctggccccagtatgtccacctgtacaaagcgcaggaagtctgtgccagatagggacagcagagagcagctctcaggcagtagaggggcaggtgagatgcttgagagagacagatcccagtggatgggagatgagacaggcagagaggacagatcacgaattaggcaaggacagacatctgcaggtcggcaagcgagtcttcagtggtcgtaactcaggtgaagttgggaggcagcaaagtgttatagcaggagctagaactggaagacagacgtactagctaagggagggttcctcagcctcggcactatggacatttggagtcagacaattctttgtgttggagggagcaggggcctgtcccaggcattataggatgtctagcagcatccctggcctctacccactagttaccagaattatcccccaattataacaatcaaaaatgtctccagacattgctaaatgtttccttggaggcaaaatcacccccagatgaaaacaactgagctgaattttttcttttttaaccagcaactgaacgtcacaaaggtttactgcttactcctctgaagagacctgctcttcaatgggttttactccatacagtcattcaagccccaggcttcctcccactcatggctcactgacccccagcctcagggccctccactggatcattcacatccagctggccaatgagctcaggggcagtgtggagagattgaggggccaggcctggaagtgactgatatcacttctgtccatgggctactggccccacttaacagcaaagggtgaacctggctcagcagtgggcaaggagggaaccccagatatgatggacagctacccccatgccatgtcagctcctggtcctggccctgactctgccatggatggctcctctcacctgggccagtccctcctccaggcctcagtttctttctcttaaaaggccccttccataaacaaaaggtggtctatccattcaatggaatattactcaaccataaaacagaatgaagcactgatatgggctacaacacggatgaacctcaaaaacaagccgcgtgaaagaagccagacacaaaaatattttatgattccatttctatgaaatatccaggataggcaaatccatagagacagaaaacaggttagtggttgtcaggggctggggggaaggagagtagggaatgactgcttaatgagtcccaggttcccttttagggtgcttaaaaaatattttagaactacatagaggtgatgaatgtactaaatgctgctgaattatacactttaaaatggttaattttatgctatgagaattttacctaaactaaaaaaaattaaaggaacttccagctgtaaccttcggtgaatgcttaagatccaggcagtacaggaaccaggctagggcacccaaaagtaggaaaatgggaatctgttttccccggagacacaccccaaataaataagaaaacaaaggcccctagtccccactctgccttttgagtcaatgcaatataagtgagctttgtaaactataaagctctctataaatgtaagcagacattattactggggcattatttaggatctcattgttattctgaatgcagccagggcagggctggacatgaagggagtgagctgcataaatgcgtgtgtattaagggcaagccagcacaggggctctaaatgccgtggcccagaacagccattactatttaggatgatgtaaattaataatgaagctgctatttcttgcttcctaggtgcccaacactacacaacacaccttccatgcatctactcagttaaacttctccgcattcttgaaaggtagtaggattagaactgttttaagatgagaaatagaaaagtgaaaggttaaataacttgctatatgagttatctattgctaagtaacaagttatcccaaaacttaaactgtggcttaaaacacagttattatctcacactttctatgggctgggaatttgggcagagctcaactgtcctctgtctcagggtctctcgtaggctgcaattgaggggctggggtctcatctgaaggttcagctggggaaaagatccacatccaagctcatgtggtcattgtgattcagttccttaagggactgagtgtcttggatcctagctggcaggtggctggaggccactctcagtttcttgtcacatgagcctctccaacatggcagcttgcttcatgaaagtggcaagccaagaaggcactagaatctaacaagacagagattgtcatctgatgcagcctgtcatcgaagagcacctcctcacctttgctgtcttctgttggctagaagcaagtcactaggtccagcccacactctaggggaggggactaacacaagggcatgagcaccacgaggtgggaatcagggcgggggaccatctcggagtcttcccaccgtgcttgccaaaggtctgtgggtgctagaaagccaagctacatgcaccctggctttgtagaggaggctcaagcccatatcattgcactatactttctccatgttcttcaagggtaggcagggcgtgggggaaggcaaagagggagagagaaagagagagacttttctatagaacaaaaagatgcattaagctcttcctggccaggctacactgatgaggctgttcctgcaggacacagcccagagctaaggctgcccccaatattaatggtgtcctcattaaagtcatgagcagggctatattttaattgcctggcagagccctgagcacctaaaggggagacttgccacatcctcctcatcatgactattaataggctgggaacattcagggctgctcaagcccagggttggcaacccccactccctccaacacaagcagctcaagtcttctccagaccttctttacaccagccccacagacctgcagtaaccaagggcaacacctggccttttccccaaggctggtatagtgtgtgcctggaacttggtcttctgagcatctgggagacaagggtgaaagacccaacccgtcaccacccaacctgctcaagggaagagcctcatctcctagccctgtctccctggcagccagcacagtgcctggcaggtgggcctcagtgcatgagatgagtcagtggctgcccacaggggtcatctatgcagatgtggtaggatgcccatgagaccaagtttgagcagggaaaattagtctccaccagcttctgatttcccatctatctttgggtgagggggatgttttcaaactctctaatggccagaagaccaaggcagaggggagaacacctgagattagcaggctgagtgcttttgtaaatatttaccttcttggtgccccagggatgtaaccatacaaaatgtaaccctcccagcacccccggcttccaattcagacagggtagagatgccatgcctcagtgtacctccagggttggaagtgaacacctgccattgtcccacccgcatttctttctctagagattgccaggttttgaaacataaaagcttctatgcaatccccttccagccatagagtggcgccatttgctcttcagcctcccttccaagtaaaactcttgagagattccagtgtgcattgctttctccattctaggggtacctatcatcagtgggtccaaagtgagttctctggctgctttcttactaaagcagggattaaaaaaaaaaaacatcttaatatcaggatccattccacctctgactatatacatgcatgtacatacagcctgacagtctgtgccacatgagtagtctagaaggccacctttccttccacggcctccctagcttggacgggctggtaactgtatcattcttatttgcaaggctggactaaatcttgtagggcatgttatccaatggccacagagacctcttgactcctccaacaggaaaatgggcagctcctccccctgagaagtcttggccaagcagggtcagagcccccacaccctgcccacccactccctacccactcctccccagtcacaggtctcctttcctccaagttccagcatgcctcctcctgcctccctaggcccaactttgctgtgctgggagcaaagaaagctttattgaattttcgcgagtactttgcatggcatctgatttacaattcataacctggattatactgcgagttcagccttccggggtcggtgtaatttagatcttggaaatatttgccgtgctttcaattcccctgacatctaagggattggaaatggattctgcccctggaggtttgctatttggaggggccgatggaagggggtacagggatgaagacagctcacaaagggaaggtggggagcagtgaggcgtgaaaactgaggtagggaaaagataaagttaaacaccagcaggagggaatgatcacatgcatgagacagaggggcaggggaggccacgtgaccaggctccctaccacctgcacgcgtcacctctgcttgtgtggtgatggccctggggacaggagtgctgctgtccaggggaagtgccttggcagcgtggagcaacccaccttcccatcccaccttctggtcctgcctctttccctacctggctgtaagaggggcaaatcccctagactttttctttaaccagtcttatataattcacataccatacaatttgccacttaaagcgtgcaattcagtccaggcatggtggctcacacctgtaatcccagcactttgggaggccgaggtgggcagatcacttgaggtcaggagttcgagaccagttggccaacatggcgaaaccccatctctactaaaaatgtacaaaaattacccgggcatggaggtgggcacctgtaatcccagctattcaggaggctgaggcaggagaaccgcttgaacccaggaggcgaaggttgcagtgagcagagattgcaccactgcactccagcctgggcgacagagtgagactccatttcaaaaataaataaataaaaataaaatttgcgattcaatggcttttagtgtatttacaaagttgtacacacatcaccatgatcaattttcgaacattttcattaccccaaataaataccctgcaccccttggccatcacccctgtactagtttcctggggcaattgtaacagattaattataaactcagtgcctttaaataacagaacttggtcctctgtctgttgtggaggccagagtctgaaatcaaggtgtggtccgggccgcggtccctccaaagactccaggagagagtccttccttgcctcttccagctcctgggggctccaggcactccttggcttggggctgcatcgctccaacctgtgcctctgtcttcactcggccttctcccctgtgcctctgaggaccaaatctctctcagccttttccttataaggacacatgtcaatgggcccaccctaaacctagcatgacctcatctttagggtctaccataaatctagcatgacctcatctttagggtccaccctaagtctaggatgacctcatctgcagtgtccaccccaaatctaggatgaattcatctttagggtcccccctaaatctaagatgacctcatcttgatacctttaacttaattatatctgctatgaatcttacaaaaatgagtccacattcacaggttcttcaggttagaatatggacgtatcttttgggggaacacacgtccacccactatattgtccttttgcctctgtcttccccagcccctggcaaccactgatctatatagatttgtctattctggacatcttatatgaatggaaccatacaatatgctgtcctttgtgattggtttttttcacttagcacaatgttctcaaggttcatccatgttctagtacgtatcagtatttcgtctctttcaattattgaataatatggatatataacatcatatctatccattcatcagttgatagacatatgggtgttttttttttttttttggctattctgaataacgttgctgtgaaaattcatgaacaacccctaaccactttttttttttttttttttgagacggagtctcgctgtctcccaggctggaatgcagtggcgtgatctcggctcactgcaagctccgcctcctgggttcacgccattctcctgcctcagcctcccgactagctgggactacaggtgcctgccaccacgcccggctaattttttgtatttttattagagacggcagggtttcaccgtgttagccaggatggtctcaatctcctgacctcgtgatccgcccgcctcggcctcccaaagtgctgagattataggcgtgaacccctaaccacttttaccattagcgaaatagtgagaatttcatatttgtcttccccaaaacccagcgttaggatgagtacggcaggcagcttctagaatggctctgagtgttctcccatctcctggtattcacgctcttgtgtaatcctcttgccttgagcatgggatggacctagtgacttatttctaagaaacagaatatagcaaaagtgatgggatgtcactaccaagattaggctgtaaaacactgtaacttctggcttgctctcagtctcttgcttgatcacttactttctctgttgaatcaacctgctatgttgtaatcttttctatggagaagcccatgtagcaaagaactaaggacagcctctggccaagagccctctagggactagggcttgccagcaaccacatgagtgagcatgaaagtgaatccttccccaaccaagacttcagattagactgaatccctagctgacagcttgattacagcctggagagacaccctgagccacagcactcagcaaagatcaccaggattcttgacccttagactgtgagaggatattgtatgtgtgttggtttaagctactccattttaggctaatttttatgcagtcttaaataaagtgaagacagaagaaaagatactcttgggagaccctgagctgccaggatggtggatcagggatgagcttattgggaatgacacttagcccagatgacctgatgttgaaaagtcttggctgcagacatcccaacaccaaagtctattaaatgatttcattttcttctttgggatggaggagaagtgctgagataaccagagtgaaaaaatcagatgtgatatgccatcttcctccctctgaagctacagagccctgaaggcatggaaggcacggaagttgaaggaaggagcagtggttagctccaaatttgctcaaaagcactacaaagagtagagttgggtcaaggaactagaaatctgggcttccaggacagtgctctttctagtgcactagatttcctaaagggcaaagaaagcacattatctgatccagaaaagactgcttagggtggccgagagggtgaatacctgaggacaagaaaatatcaaggcttaatggcactatcaaagtgttaaaattttattacaaaaatggctctgaccatatcactcatcctacatggtcttctcacaatgtgactttgccacttcccctatcaaaaaggaaagtcaacatcttccctgaaacctaatcagaccttagtgactccttcagcaaagtatagcaggaatgatgctacatgacttccaaagctaggtcataacaggtgacacagtttccacttgcctctcttttgggatgcttactcttggaacccagctgccatgttgtgaggaaccccaggccacacggagaagccatgtgtaagtgtcctgtcagacagctccagccaaggtcccagccaatagccaacattaactaccagacatgagagtgaggaagtctttcagatgactctagccaccatcggaataaaaccacatgagagaacccaagtgataactgactggctaaaaccagttaacctcaaaaatcatgaggaatagtaataattaatgatagttgtattagtctgttcttgccctgccacaaagaaccacttgagactgggtaatttataaagaaaagaggtttacttggctcatggttctgcaggctgtgcaggaagcatgactggggaggcctcagaaaacttacagtcatggtggaagatgaagaggaagaaggcacgtcttacatggctggagcaggaggaagagagagaagagggaggtgctacacatgtttaaacaaccagatctcctgagaactcactcactatcacaagaacagcaagggctaagtctgcccccatgatccagtcacctcccaccaggcctctcctcaaacattggggattgcaattcaacatgagatttgggtggggacaaaaatccaaagcatatcaacagttgtttcataccactacatttgagtttgtttgttacatacctacaggcaacccaaaccaagcaataatgctataatcatgaagatgatctatagatagataagctgatagatggattgatggatcaatgggtggatggatggatagatggatgaatggatggacagatggatgaggaggtggaatagggtaacagagagacatcaaatcagtacttactatgtgttcatagtagtcattgacactagaccaagggatttattgacattatctcttttttaattctcacaacaatcttatgaagctggtattcttattcccatttatagaaacagtaacttagatttagagagtttcaataatgttcctgaggctacacagctagcatggagtaggttctcctgacctcaacgtccatgatcatgatacgtctggtgtggagcacaggtaagagtgtgaaactgagagtgaacgtaatagaaattctaggcctaattaactcaggcagaccttaactattcatgacaccagcctgacctcttttctggatgcctcacttcaagattttatctggagtacatgttgctctttattctcctgctgaggactacagaaaagcctattttttgacataagaacaaggaacctaagagagaagcctccctcctgtgctgtcttttgttctggaaaggcaatgaccaaaatgggaagagctgttttgctggtattgttgttgtcatgatggtgatggtgatggtgatggtggagatggccatgatgatggtgaatggtagtgagtggtggtggaaatcgtagtagtgatagtaatgatggcgataatggtgatggtggtgatcatagtgatggtggtggtggtgatggtagtggtgatggctatggtggtgatggtggtgtagcagtggtggtggtggtggtaatagtggtggcggtggtggatatggtagtgatgatggtgttaatgattttggtcatgatggtggtgatgataatggtggtagtggtgatggtgatagtagtgatggtggtggtgatggtagtgatgttggtggcggtaataatgatggtgatggtaatgattttggtcatgttgatggtgatggtaatggtggtggtggtgatggtgatactagtaatagtggtagtgctggtggtgatagtagtgatggaggtagtggtggtgatgatagtgctggtggtggtgatgatggtagctgtggtaataatggtggtggcaatgatggtgatagtagtaatggtggtgatggtggtagtggtgttagtggtgatgatggaggcaacagtggtggtgattgtagatgtggtcatggtgatggtggtagtggtgttagcagtgatggtgatagtggtgatgatggtggtggtaatgatggtggtggtggtggaaatgatggtggtgttggtggtaggcatggtagtgttgatagtggtgtcagtgacgatggcgttggtgttagtcaaaagccatggaccctctctgcagaaaagggaggcctctggccaggatcatgccaaaccctctcctctaaagtccaacaaaaggagatgggcatggtacttggcatccatagaatagagctgattatataaggcccttccaaactcttccagcagccaagagcctcagagctattgacacttgccttctctcctatgtttgttctaaatctggctcactgtggctcaagagctattactgattctaagttaaaaacccaatgcaaatggagggtccttgtaagtttaacacatcactcccaaggctcagcacagtgcctggcctataacaggcccttgatacacatttatgaacaaacaaacccttcagcaagctatagtttaactgaggaccagaaatatccacagttggattcaaaagtatttcctgaagctctcagggaggagtatcctaatctaggagttgggaagcctggacctcccttaagagaaagatggcttcagagtccttctaaccatagacattgtgccttaatcacattattcaaggatgcataaactggctgctgactaagccttttgtgtggcctggaagaaaacagattttttgagaacttactacagtaaaaagtaatagttaatgtttctgatggcttgtgatgtgccatttaaaaaccacacaaatttacttatttgaactcacagcaaccctatcatgcatgggttatcatcatcaatcatcatcatcatcattttatggaggaaaaactgtagacaagacacacgaagaacaagcaagctgcccacagtgtcacagctagccaagccagagctggacaaatcccaggcagtctaagctgctaaccactgttcaacctggcctcttgccttccgatgtttgctatgagcctggccctgcactctgcatctttctatgagttgttgcattccatgatggcttcagttctatgcaataggtgtgctaccgaggtcttgggagggagcagttggcctacttagaggtgtgatgggagagagtctgatatggtttggctgtgtcctcagccaaatctcatcttaaattgtagctcccataattcccacgtgttgtgagagggacccagtgggagataattgattcatgggggcagtttcccccctaccgttctcatggtagtgaattagtgaatgagtctcacgagatctgatggttttataaggggcttctgctttcacatggcatgtctttatcagcagcatgaaaatggactaattggactctgtattaacagagtcctgatgaaagaaccattgacaatggtgtaacaggctaaggagatccaaggaatgtgggtgtcgcacccagcgcccagccagagagggaagccagtatgcccctaggactgagtgggtaaaggaagagcttggagacagaggggactataggggaaggccttgacagctactgccaagccactgcctggcctggaaggagccaggacccaatgtcgtcacttctctcatcttaccctctgagctctgtcactgccacatctgtgcaagccagagctaaggtcctcagagaccagcctcccaatcagagcaggtggagaagaagggagggtggtcggcaaagtaaacggacaccttccagcacagccgaggctaagaagttgagactaagaaactttacgcaacttgcccaaggacacaagcttggaggtgagaaagccaggtggacttcagaattcttcccaaggctgcctctgtggcctgagtcacagtgaagaaggctttcgtgtgtgtacattggtgtaaatgatcatcagccaggctgccagcagcctccgcagtgttctcataatgggattttaattcgcttcccccatcgtcctgctgagctgagaagcgctcctgtttgtctacttcttgttaggctgctgcttcaaagcagaaacaggaggcagtccctctggtccacttgcctttcatgctctttgggccaaacccctttcctcacgtcccccagcagtttccacaaatgctgccatcccgcctgtagccagagaggagaagatacacagagtgcatctttggaaagaggagaggacctgaccacagtcccgggacactgaccagcagcctggcaagaacagaaagtggctgtctaccctgagccaggctttggagtctaacagaaccgggttcccagtcttccccatattgggaagcaccaccacagtcacccaactgttcaggaccgaagctcgtgtgttcactcttgactcctgtttttctcacccctacatccaaccatcaccaagtcctttccagagaagcaatcccaccagtctgtgtccattcttctgacaggctggggttgacttccgtttctttggacactctaagtggaattccttttataatggatgtgttcctgcaaatttgggcttaaactgcatttttgtaaattgaaccccagcatgccattggcttacccaagctctcactgaggttggctccccagggaatcctaatactttaaccctatctctaccgctggaagactctagaattttccaaaaggcattttgtactgacccactcatgttcctggtcacgggttgttccatgggttttaactactgtgccacttattgagctcctaggagcagttcccggggctgccctgtaggcagcttccattggtactgatggaaatgactgtgctggctgcactccactggactcccccatcgtcccctcccattgccctgccaaaccatgctctcttctcccctctgctctgtgccttggaagggtgacttctccaggctgtgtcagctgggcccttttgtctcctgccttctaattgggtttggcctatcagaggcactggcaggagacagagggcaggaggagggagcgatgggggtactgattccaccctctccctccctccctgctgctgttctgagagcagctgtttctaccagggccatggttcctgttgggtggctccctctccatggctccaggctccgatacctccacttattttccttgtccctttggacctaaaggtggcaaagcctccccactcttgctggcccctggatcctacaccaggggagctggtttccttaactcttctcacaaatctataaatggcctctttagtaaactgcctttgctggaacccctcaaggataccatctgcttcccgccgggaccctgcctggcacaacgacagtcatgacgatgatgttgccatgctctgaagctcaaaagcctgactcccaacccccacccagggccctgggtaactcacttttagccccagggtaagttgggaggaagactagatgcctccgaggagtccaaaaatgccaaggtggggcaggcaccccgagggcagggcttctcagcctcagcacgactggtattccgggccagatcattctttgctgttggggtggccggggctgtcttctacactgtaggatatttagcagcatctgtggcctctacccacttgatgccagaaacaccccttcccagtcacgatcatctccagacattgccaagcatctcctggtggggagagtaccccctggttgaaaaccctgacctccaaaatggtggggcatgagctgagggctagctgggctggtttgcttcttaggagaagcacagagcaagcatggggagaaacccaagaatggggtcctcggccaggcagagattccatcgcggctcctccctgtgcctttctagcctcagcaactgggcgggaccaaggcttggcgaaactcactggtcaccctcagctcgatgccctgcttggccctgctgcctgagcgcaggagtccaaaaggcaccacttggctctctcctggccctcccaccactcacccacactctcctcctctccccttacccgcctcaaaatgattctgggaggcagctggcagcaggggagtacagctgccgctaagttatccaaacgatttatcttaagattcatgcagaattcattgtgtggggaccagggtgggttgtgctttaatattcatgcagatttggaagaaatgttaatcacgggtttgggtaatttgcacttttgcttaattctcctcctcctaggctcagttggctgccccgctagccccctcactcctctgctcctggctcctgcgccctagagttcttccagcccaccgtgcagctggggtggactcagaggttggagggagggtgctgagctgctgttcccctggtcggactggccccacagcacctcggggtggggagcgggagacggggtgggcagcggcgggaagagctgcaggagcctctgggacatcttgacgggaaatagataacctgctgtagcaaccagatatgtgcaaattagcattgattattctcaaattaacagcttgggcatttcaaacccaaaacaaggcctcagctctgctctgatcttgccctccctcccagctcccagcccggactgttaccccctccccacaatgacaaccatctgggcctgatcagggtgagaggcaggcttcctgggggaggggacctggggggtttccagcagatctcatcgccttcttacccctcacttggacctggggcctgagtacaggggcccaaaacaactggcaccctctggctgctccctcccagccctcgcacccctcacccgtgctcccctcctctccccttaccacctcccaaatgattttgggaggcagctggaggcaggagaggaagagattcttctgaaaattttccctggttcccactgcccagtatagccaactccacctcctcagccctactttcggggtccaaacccctggaaatcaggggttttgaaccagggggagctttgcccccccggagatgtttggcaatgtctgaagatgattgtgaccgggaagtgttgctctggcatcaagcgggtagaggccatggatgctgctaagtatcctacaatgtgcaggacagccctggccaccccaacaacaaagaatgatccagcccaaaataccgaaagtgctgcggctgagaagccctgccctcggggtgcctgccccaccttggcacccttgcttttcctcagaggcacctagtcttcttcccaactcacctgggggctagaagtgttacccagggccctgggtatgaaccccacatacatggagaagggggcttaggactcaaagccacaccccatgagcatgtgtctcactctcttccaagtgaggtggagacagctggagggggcccaggagccacagcagaagaacgctggaaaagccctgagtgccccaggcagaggatccagcgctcagaaggggctgctctctacactcccctctccatttcaagataagaaaagtcgagtccagagaagcaaagccactaggccaaggttacacagctcattagtggcagagggagctctgagttcaagtttgcctgaggcccaatcagatggctgcagcatcagagtccaagcagaaaacaggcaccactctgagtgtctaaaagggggagatttatgcagggacttgattgcacaggtgaaggaagaactgagaaggggatagggaggcaatttgggaattagcaacagtgggaagctgctaccacctcaggctggaggacaaacggaggagaaggcatcagtggaccccacagccaggtccatcgtggaagctggtggatctatctaaagagagcagaagcaatgatgaaatccagcaatgctggaaaggaggaggaaaaatactctagcttctccctcctgcttgctcccatctcctgccgggacttaatgtccaaaccagtcaggagccagctgccacggtcagcccctcaaggtgctaagcagagcaggagcatcgaaaacgggtctgagaaccagcaggcaattgaccagcacaagaacttccaaaccaaatgttgttcccctccctccctcaggccttgccggggacttgtgaagaggagggtgaggaagaagacccaggaggagaggcaccacaggcctgtcccatgcaccggagtcagtggagacagcgcagctgagttgaataaaaagggagctaggggctgggggtgttgagagttggctctctctcctccaggcccatcctcccacccctgctgggatctggtcagcttccaaccccagcagccggtgttacctgccactgcctgtcagctttccccccaccacgcagctgcttctatcttggcccagaatgataatcagggagccacagacacagagaaagtgtggcagcagcccagatggccgccccttcccctaccactcccttgctatgaagactgggtgtccaaatccctagcgcccacccccactagacacacttatatgcatgcgcgggcacaacataccaaggtgtcccagaattaaagttccctgggaaggctctcagaccagaccatgtcaaaatgcaacagaatatctattaaagcagggagtcaatgagatgctcattgaaggggggcacttagaaatagtctcagccccttccttatctagtggaggagaactcacagcagcatagctgaccttttccaagagggaaccccttgaaagctacaggtgtatggcaaggaggccaccacctgttgcaggtaaagggtataaactgtgacatgccctgagagccccgggattcagaggtcacttggaatagatggtccaaaggtcgcccaggatagctggcccaaagcagcgccttaacaccatacctggcacatggtgagcatttaggaaagcacttttgtctgcttaaatttctagcccttctttgggctcttttgggagacccctcatgcactacatgagcttcaaacacagtggcctgagtgatccctcctggttacagagtgatcatgtgacatcatgcatgtgatcgtgtgactgaactgtctcggggctgcattccccagatcagagtgattggttcagagatggacatggagttcaagccagccaagtagtcttgctggggcaaatctattgactctgttggaaaaatgatactttggcaggttcacagatggtaacaaatgtacccctaggtgcctgcatagataggaggcgaggctctcagtatgaggggcagggggtatacgagaacactgtattttccactcaattgtgttgtgaacctaaaactctctaagaaataaagtctattaaaagcaaaaaggttaaggtctttaaatcgggggaaaaaaaaaacagatagatgccaatatagaaaagaaagaaatacaggttgtgtgtggtggctcacacctgtaatcccagaactttgggaggccaaagggggtgaataacttgaggtcaggagttcaagaccagcctggccaacatggttaaaccttgtctctattaaaaatacaaaaattagctgggcatggtgacacatgcccgtagtctcagctactcgggtgtctgaggcaagagaaccagttgaacccaggaggtggaggttgcagagtggagatcgcaccactgcactccagcctgggtgacagagtgagactctgcctcaaaaaaaaaaaaaaaggaagaaataatatcataatttaatgttgaaatatttctgtgtgtgaggcagaggggctgggaattgcgctttgcaaaataagagctatttctatgaaattatatattttggggggcatttagatacaggaattacttaaatagtttagcttctattgaacttttgtgtatggggtatgagatggtaggaaaggccatttgcaactatctttttaaaaatcataaatgcaaactaagctttttctatgaaattatatattttgggaggggcatttagatacaggaattaaatagcttagctgctattgaatttcttttgtgtatggggcatgagatggtatgaaaggccctttgtaactatcttttaaaaaatcatttttattgagtctgaatattgtaataatattttgcactacagttgctagtgctgggtgaatgagagcctgcagggccagtagttatcctgcctgtgctgtgcaggaccctgtcatgagaatgaatccaaattgaagttcgaagaggagagaaagtcctgatgacattgtttgaacccctggaaacactcatgcataaagtcagcacaactcttggacatttcagatacatggaccaatgaattccctaattcaagttgtgtttctgttacttgcaacaaaaaagccccaatgaaataaatcaatggataaatgagcatataacccaagacttgaaagaaaagaaacttcaactcccattcccgagattcaaaggtaaagagatttatgtggataaagcaagatagaccagcatggctacgcacaaagcttagtggctgagaaaaacaatgagaactcttgctttataaaactgccatgtgaaaggaagagtctaggctggtgacccagctcaatgcaatggcttaaaggtttgttcagaagagtagattttactagaaactaaggctgatgttggaagctccccagatcaaatcatcctatcacttggttgcacagtgggagttgttggccaagcatggaaatctgaactatagggggctgtgacctcgatgcccttgggtggcactgctgtaccctgagttgggattgagaccatgaagcacctgccattaattagtcagtgtcactcactgagctctgcaggcccagtctccaacagcgacatcaggtggcagtgggaagtaatggcagtgattgaccaatgagactgtacttgtcaagtctctgttggaatagggctgtaccccttagtgcagagtaagtccctgagattctcggacaaatccagtgtgagggaggccacaggaggagatcctggacattgtgagtattctggcaaacaactggaaaaaaataagagctgtaatatatttgcctcccaaactggaagatcaagtcatgttttccaaaagatgtttaaggctagaaggtcaagagcttaaaagtctgattccagcctctcattaatccagtgtgtgaccttaggtgtgtcatgttcacttttatttctttattaacatcccctcccccccacactggaaaaagagaatgagaagagccagaagtccccttccagtgcacccacagatgatgcggacaaagctctctgaaggcctcacctacatcaggtggcagtggctccaggcaagtatctctcctactatacaacatcccccatgccctgcggctataggaagctgccaggacagcagacctggaagaaagcatcctcctggggtgaggaacaatgcacaatgtgggatttgtatcaggggtggcccctagcattgagtttaggacaacctcctgccaagcagctctcaccaccccaatcccagtccccgagaggccaaaacacaaacctgacacccacttcagggcccccttgctcctctcctgtgacacctacctctccctatagaaaatgccaagtaggggccaggcgcagtggctcacgcctataatcccagcactttgggaggccgaggcgggtggatcacgaggttaagagatcaagaccatcctggccaacacagtgaaaccctgtctctactaaaaatacaaaaattagctgggtgtggtggtgcacacctgtagtcccagctactcgggaggctgaagcaagagaatcgcctcaggtggccattgcagtgagccgagattgtgccactgcactccagcctgggtgacagagcaagattctgtctcaaaaaaaaaaaaaaaaaaaaaaggaaaagaaaagaaaaaaaacccaagtagggcaggaacacctgtgggccccaggatgctggaccacagcatgcaggcaggaagagaaccctcactccccgagctagacggaatctcagcaatgttatttaagtgcttcagttcacagataaggaaactgaggcccagtagggggagtaagtctagaaagcctcccaaagggatcagcggctgggctggccaaggctggggcccagctcacctgtctcctaaccccacactctcttccagcatccccctcttcccaatgccatatcgtctcagacaggggctctaggtctctcagcacagcacggccagctcatggccacagacaaggatagtgtggggcagaccagtaggcctctaagcccatcccaccccacccttctgcccaaggcagggagcttctgagcccacagcaatcccctgagcttccaaaggctgcagaagctctgtccagaagagtgcagacttaagggggatttgggttgagcaggaagaaagggagtggagggggctgaggcccagagttgtgctctgaggggactggctgtggacgccgagagcaccgtatgtcaaagctagatccgagctcagacataagcccccttcccctccttagagggaaaatacacaagctgctttcaatgaaggctttaaatggaacgtgtccaggcatttcaatgttctcttcccagaatagggccctcaattccatcttctctgagctggcaactaaggaaggacatctctaactttgcctggaaattataagtctgccccttgctatttgctctgtgagagacagtgcagtgcagtggtcgggctggagacgccagcttagatttgggggtgaggctgcctctctgggtgtggctctgccacttactgactgggtgagctcaggaaaccactttatgtctgtctctgagctcccatttcttcacctataaagtagcaggatagcattgcctactgtatttgtttttcattgctgctgtaacatgttgtcgcaaatttaatggcctgaaacaacacaaatttataatcttacaattccataggttagaagtccgccatgggtctcatggggctaaaagcaaggcgtcagcaggtctgcgttccttctggaggcttcggggggaatcatttcccctgctttttccagcttctagaggctgctcacattccttggcgcatggtcccttaacctctgtctgccaagcctgcagcacagcatctctctgaccatcctgtcatcacatctccttctctgacccctcttccgctttaaagacacacccaagttatgataataataaaccccccagccccaaatccttaacttaattacatcttcaaagccccttttgccatgtagggctccaggaattaggatgtgcctatcttttgggagaagggagtataattctgcctaccacatctactttttagtgttgctgagcgggtttaaggcaaggatttagcacaatgcctggtacacagaaaccactcgataaagggcagctgtattcatggacatggcctcattttgtgatgtcttccaagggcagctccgcctgcctgtgacacactgtgccccatcccctgcacacacatcacaccaaggccagcatgcacgtagcacccagggcacatatgacaggcttgctgcccgctgtccctctgcacacagcctgcctctggcgcaggctccagatgctgctgtgcattttgcttctgctcaggcatttgcatcctcttgcagtgccacagatgtttgcacagatgttcatatgctgacagacacatgtgcacatacatgatctgccactcagatcagcaaagtgcacacagacacgcacacacttgtcccatataggcatgtccacatctccccagaccccactgacagaggcccctgctcagagagggcactgccactttttctggccctgagcagattgagctgcctccctgtcccctgcagcctgcactcagcagccccttccatgtcttgtcctgagtgtcaccacctcccactcctgctcccagagccccagctccattgattggccttgcagctcagcagccggagatgtgccccagctggagcaaaacacttgtaatttatggagtgtctgatttttaatcagttttttgttcctgtgctgtaattgtcctaattagatatacatattttgatgaaggtttttccaaaataaaaattgtaatcgaatcttgcttgacattctttacacccactcgctcagatccaaacttccacagcagcaggctctggaaactgtgcatgcagctcaggcatctccacacacctcccctggaccactgcaggagctgtcctgtggctctcacaggctggaaggcaggcgcccactaggcagggcagtttcctttgccctgggcctccaagtgccccatcagggtggggcagccttctccctgcgggtctgggccctccagggcttctgggccaaggcttacccctgggggagggctcaggactatctagcactgaggtgctctctctctgcccatgcttctgctccctgggaccccttcaccaaccacggagaattgatgccatcccacaggcctcaagggcaaaggctgcttctgtcatcccccactctgataaataacaacaattcctgccacttacggagtatctaccatgtgccaggcactgtattttatatacattagccctaatctgcataacaaccctcggaggggatttttcagaggaagaaatcaagacttggagagggtaattcactcgctcaaggtcacatggcaataaatgaaaggactgcagtcctctttgccagaacactgagaggtaatggctgccttcctgggaaaatccaagaggagctgcagtcctccagctgctcctcttagggggaggatccacagggctgatcttacccctgcaccccagcatcaatctgcagctgaccttgaatagccaatgatgcaaaattcctccttctgagcctacagtacagaccacacatgagaagtctggtgtctgtctacatgagtctctctaggacctggaaaccagggttcaggtatcagtgtgtgaccaagaagtcagccctgcgactggctgggaggctgtggacaagagctgtttcctaggatctcagactccaagaaggaccctcgcggcaaacctatcaggagatccaagctaagaactttctgtgctggttcttaaactgctgactcttacctccaaacctcccagtcatactctgcaaaccatggttgtgcttcgcctgatgcacccagttagctcctgccagtagggggcactcgggagacaggcaagaagagggaggaggacttgttcctttcctttgcttcctgtccctctctggtgatgggtcttcaatctggtggtggagctggttctattgtcagtagttggtcctagtttgcaatgtgcttgtcccacacttcagaaggtgccttattgtgccctctcagagatcccagcagcaactggcacctgccccatccctgaagagctctgagttccagctcctagtggcctctccaccaagcttttaaattccaataatcccaatctcttcccttgttccctcagccctagggatggtggctgcttcttgcagttgctacctttatgattgcttcataagtatcacagaacttttgcagttctccaatactccaactccttctattaaattctctctgttaaaataactggtgtggtttctgatgttttactgccctacaccctgcatggtgtccaactgtaaactggaaaaggtgtgttgagaggtgccacagccacacctgtgttggggagtgtggcccactggcccacagagctgggcaaaaaaaccagcagagaactatgccacctctagtgctcaatcggcacactaggctgaactgataaaggagtaagtgaatgaatggacaaaagaattaataaatacaataaaaatgatcaaccatggagcagtctgttccagacccagacatggcaccccccttcttacagagcccagcacaggctaaaatcaccaagacaatctgatttggtaatggttaagatgagaagtttgattgttctctggggtaatttgacacagaaagggggagtaggagcaacactgagcaccagctgagcctactgactgtagtaattagggtaattaaagctagcaactggcccaaaaatcttggtggtttaataaaactgctcagtggtttatttctcactcacctcaagttgaatgtagatgttgctgatcaatcagttcttccaggagattcccctccaagtggtgactcaggtatccaggatcctccctggatcttgaggctctgctgtccctaggatatcctggaagtcctctgttagggattccctatattgagctgaaagatgagaaaagaaagaaaacatggagaatctcccacccaatgctcaaccaccttggcctggaagtaatatgcatcatttccattcaaattccactggtgagaactaatcatatggacctacctagatgcaagaggggctggaaaatataatccatgactgagcagctattttccagaaatggtgatacaccatggatgtggaacatatttttgttggtcagctaactatttctcttaccctcaggtacggtattaacttgaagctatgatatcaaaaatatgttagatcttgtcttagtctgttttgtgtggctataacagaatactacagactgggtaatttataaacaatagaaatttatttggcttatggttctggaggttgggaagtccaagagcatagtgctatcatctgatgagggctttcttgccatgtcatcccatggcaaaaggggaagggcaagaaagtacgtgccaataagagcaagagagaaaggaacctaacctatccattttatcaggaacccgctcccacaataataccattaacctattcacaagagcagtgccctcatgacctagtcatctcataaaggtcctacctctcaacacaattgtattggggattgtgcttccaatacatgaattttgggggatgtgttcaaattataacattccactcctggtccccaaatttatatcttcaccctgcaaaatacattcatcccattctaatagtctccaaagtcttaattcattctagcatcagctcaaacgaccaaaatccaaagtctcacctaaagtagatgtgggtgagatggaaggcatgattcatcctaaagcaaatttcctccggctatgagctgtgaaatcaatgtaagttatctacttccaaaatacaatggtgggacaggtatagaagagacactcccattccaaaaggaagaaataggcaagatgaaaagagtaataagccccaagtaagtccaaaacccaatggggaaaacaacattaagtcttaagtcttccaaataacttttcttgactccatgccctgccttctggaaacactaggataaagactgggccccacaaccatggttttactgggctcagttcacccagcagatctcatggactggagtctcagaccagcagccttttttttttttttttttttgagatggagtctcgctctgttgcccaggctcaagtgcagtggtgcaatctcggctcactgcaacctctgcctccagggttcaagtgattcttctgcctcagcctcctgagcagctgggaccacaggtgcacatcacccagctaatttttgtatttttagtagagaggggtttcaccatattggtcaggctggtcttgaactcctgacctcgtgatctgcccacctcggcctcccaaagtgctgcgaccacaagcatgagccaccatgcctggccgccagcagctctcttagtctgttgctgcaagctcaagctagttactctatagtactggggtcttgggaatggccccactcggcattgccctagtggggactccgtcatagctctgacttcacatttccacttggcattgccctagtaggggctgctttctatggtggctctgcccctggtgacaagtctgtggctgcagccctcgactgtccacatcatcctttaaaatctaggtagagaaagtcatgcccccatagctcttatattctgtacatgtgcaaaatcagcaccatgtgaatgctgccaagattcacagcttgtaacttctgtagtgggtcaggccacatctgggcctacttgagccatggttggggtggctgaggagctctgcacctgaatgtggggaacagaagcccaacgtggctctgggcagcaagcccatgaagggtaccccaggatcatccctcaaaatcattctgccctgctagagctctcagcctgtaatgggaggagtagcctcaaagagctctgaaatgcatttggagtctgttttagtctgttttctgccaatgtaacagaacaccacagactatgtaaattataaacaaaagaagtttatttggttctggaggctgggaagtccaaaagcatgatgctggcatcagggaatgaccaccctgtggtagacaggtggaatgcagaagtttgcacaaaagacagaaagaaatgggcacaacttatccctttatcaggagcccgctctggcaataactaaaccactcctgcaataatagcattaatctattcatgaggaaaaagacctcttaattacctaattacctcttaaagttcctgccacccgatactgtcacattgatgattaaatttcaatgtgacttttggaggagacattcaaaccacagtaggttcactctcccattgtcttgttgattcctatcagtactgaccttcttagcgaatggtcacttaaccacatccttagtttgctctcctaaacatgttttttcattcttcacatggtcaggctgaaaatttttaagatcttttcattcttcttctcttttctgctaattataaattccatcttcaaatcatttatttccttaatgtatatgattaaaagtagacagcttcttcactattttgcttaaaaatttcttctgccacatatcctggttcaccactcttaatttttgccttccataaggccctcaggcatggacataattcagccaagttctatgcaactttataacaaggatagcttttactccagttcccaataccttcttccccatttccatctcagacttcatcagaatggcctctaccatccatatgtctaccaacattcagatcacaaccacttaagtaatctctaagaagtttcagactttacctacatttcttctctttttctgagccctctgcagaatcactctttactactccattcgtggcaatctagactttttctaaccggcttctctagatgcttccagcctctactcattacccagttccaaatctgcttccatagtttcaagtatttgttataaaaaatagtcccacttctcagtaccaatttcctgtcttagtccattttgtgttgctacaacagaaaacaacagcctgggaaatttataaacaatagaagtttatttgactcatgattctggaggccaaaaagtttaagagcatgatgccggcatcttgtgaggaccttcttgctgttatcattccatggtagttggtggtagagcaagagagcgcacatgagcaaaaccaagagagaaacagagacaaacgtacccttttttaatcagcatcccactcttgtgataatgccattaattcattcatgagagcagagccttcatgacctaattacctcttaaacgtcctgtttctcaacagtttcacattggggattatgtttctaatgcatgaattttgaggcacacaaaccatagcagacctaggcctttcatgggagggaatacaaactagaggcagacataaagctgtgtccattaaagaggtgaaatacattatgtgcattctactcactgggtaaccagcaacatactggacctgagtataagaagaaacataaaaattgtgtatcttgtaattccaggctttgagctgttttcagtctgactgatgagacaaggtttgtgccagtgaaacaagtagagattaattcaagacagatgtgatcaccagtctctgctggcataaatcaagtttcataaatgactgaactagcatttgaaccaacatttcttcttattttcatcccagtagcatcatcctaatctggtgaccttaaaggcttttaaaaatctggttattactagaaaaatgttgcctccatctaaaagttgcaataaagctttctttccctgagaaaaatctagccagccctttgtgtaggttgactatagcgggcatgtgcccagcatcattttcctgatggttcattctccctcacccaatactgagccttctccaatctagggaagtggtaagtccatgatccaataaaaaacattccatctacatgacacagtggtcagttaaaagactcaagttggtccaataaaaatccttccctagaattaacttaaatacactaaaagacaaaatttactttccaattgaggttgataagcttggaaaatatgaattagggctacttgtggccatgtttctcaccacacagagagattatttcccagaatgaagccaaacaagatagcaggcagaggagcaacagtttttcatcctcagtctcatccctgaaggcaggttcctactgctgtcccagaatccctcaaagctcctggactaatacattccccatttgcttgagccgattaagttggatatctatcacttgcaaataagtgagtcctgactaatatgttggcttcacagtgccatgcccagtgcatcttatctgcacatctccattttcctgcagaaaaacgaccattggatggaaagggctgtgaagctctcctttaaagtacacattcctgggcttaaccccagacttactgatgcagaatctctggggataagacccaggtatttgtgtaatgctaccagtgattctgttgcacacacagtgccaagtttgcagcatgggatcaccacatctcattggctgattcctggagtctaactcccctggaaaattttgctctggccaggtatcacactttaagatgaatactaaagggtgctatggttttaatgtgtcccccaaagtttatgtgtttgaatcttagtccccaatgcaacagggttgggaggtgggacatttaagaatggattaggtcataagggctctgccctcatgaatggattaatgttattatcccaggaaaaggttagttattgtgagagtggacttgttataaaagtgaattcgacccccgcttgccctcttccttcctcacactctcttgccttttcaccttctgccatgggatgatgcagcttagatgctctcactagatgcgggccccatgaccttggactcgccagcctccagaactgtaagaaataaaattattttctttctcaattacccatctgtggtattctgtgatagcaacacaaaacggactaagacagagagcatgaccaggagaaaaccaggtcagtgagggcactcgcgctgttcttcctctgatgtgttttttcagaaatcagggtgtttaacagcaaatccacaagggatattctgtcttcaacggtgtgaaaactgtcatgtggaagaataacagattgactttgtggtgttccagaggacaggccttcaaccaagggcatcctggtgccagatttcagctaaataaagggaagaactttctggcaattagagctgccccatggtagaagtgctgccacagaaagtagtgagctgcctggctcagccgtgtgcagacatcagcggctcaccatctgtcagttgctctggctggggctgttccactggacagaaggctggacgagctgcctttttcttgccaggattctacaattctagaacgtggtctggggacaaaagaggccaggattaccagaggggccaagtgaccagaaggggagagatgtacacgagtttgctgggaaggactcatgtgagaaaccaaactcaagatagaccttgtagggaacacaggtagcattaattacagcacaggccagcactgaagtcaggaaattttccactttttgtaacttggttttatttcactattattatcatgactgtgaattactgttagaaggaggtggaaaatcccagatatttccattttagaaaaaaataaagtcaataaactggctgaagcctaataataaatattcatgtcattgaatataaacaaggagagtgaaggaagggatgttgtgaatgaagtagcttccatgtcaagaaaagcagagcactggggccgggcgcaatggctgtaaccccggcactttgggaggccaaggagggaggattgcttgaggctgggaattcaagaacagcctggacaatgtagtaagaccccatctccacaaaaacaaacgataacagaacaccatggtccaggaggcctcattcccgtccgtctcagtcctgctcccttggtcctcaatgtcagagtgcccaggagaacctgagttatgtcttcactcagggtttctcaacgtttttccagcccaggcgtttggaaacttctctaagtatgctactgtatttctgcagcagggagaagactggagaccatgtaccgtatcagcaaccaagtaggggaagggagagggacagagacgcttgaaaggggacatctgactctcattttgcagaggaaggagaaaagagccgatgcatataatgccacccccatagtcaagagataaggctgcacagtggggctgggcacagccccgtggagaccgataaatcactcagaactctggaatttgcaagtgacagaaactgaactcaactagcttaagcaaaacagggatttattggctcttgcagctaagaggattctgggacagctcacagaattaaagaaaagactgtggggaccaggactttgggaccaattctgtctacaactccatccatgagtccatccatctgtcgcctctcccacacacccctacccagttttcatctgtgcttgtctctggtcgcagacaggctctcttccgcactgatgaagacggccaccagacacctcacattcacaccttcccactcccgcatcccccgagaaaagttcctgctggtaggatccatggcccaatctcaaaggaaggactctgattggccctgctctcatgccccccacccccctcggactgattacttttgtacgagggataggccctgtgatttgtcaggcgtgggttccatgcctgtccctaggggctcaagaagagtgaagggccttaatagcaacctctactggggtctagggtcagccctgggatgcatcaggggagtgggagggtggtgaaggaggatcttggagcaaagaggaggggccgctcacctccccctgggaaagtcctcgtgggctgacagtcattgtgggattccctccctcacacctgctgacccatgagtcgggcggctctgccttcagtgtgtggaggggtccaggcaggactggctgagggcagctcaccctggccctcagaggatgatgcttggtgaggttcagcctccggatacacacacacacactcacgcacatccacacagatgcacactcgcataccctcatacccaccagacataccctgacacacacagaaatgcatacacacacacactgacacaccataccctcacaaacgcactcacacttgtagacatatttgcacacaatcaacacactgacatacacagacgcactcacacactctcatgctcaccagacacactcatacacgtgcttattccttcagatacagacacatgggcgcctattcaaacagatgcactcacactgacacacacaatttacagacacattcatgcagatgcacacttacacatgcaacactttcacaattcacccacacatactaacactcagacacattcattctcacacgcactcactcagaccactttcattcactttcacacattcactcacacatgcacattcacacacacacattcagtcacgtatgctctcacccacactctgactcagtctcacacatactcagatgttgtctcacattcacacacattcacacacttgctcacacacacacacgcactcacatatggtcccactcacacatacgctcacacacatttgcacacacacacgtgctcacgttcacacgctttctcacatatgctcttacatactctcacacacacactcctccgtcacgtagtctctttgaaggtccagatggtaccccccactgcctccacacaggccttactgagagcacattgtgggtttgctcccctggctccacaggggacacggggccacctggctgcatctccctcctggctgggaaagtctcacactgtcccctccactcccctccaggcaggatcaccttagcctgagcatcccagtgggaaagattctgtcttgtttctaaggcctccagagaaaatgcccagggaaagcaaggagagagaagaaggtgtctctaaactgcctggcagccaaaagcacatcctcaatgaaggtgtccctgtcccgtcgccctgcctgagaattcctagactgtggttgcaactgtgcacccccagaccatctctgcaccctctctgagtccttctctccacctgcttggtggaagtcaacatgcctgcctcgagggccacccaggggacaccaggagagatcaaatggcacccagcacagagctgcccactcagggacaggtcgacgaggtcgactccatttccctcctgcagagatcacagctgggagatggtggactcccacgtgaaatcagaggagagcgatccctgggcagggtctgccttgtcagctgcatgatctgtcctggctgaggcagggaacctcggatcattaccaccctcaaagctcactccccagagtccaaaaaggaaagccactttaactcccctgcgtggtttggaaacccagacatcaaagcctttcactgcctgtgggcattttctaccccctccctatgctcggctcttcatccacccttccttccccctgcaggcctcctggccctcctcagtgggcccctatgcctttgctcttctccctcctggaatgcccttcccctcctccgctcaatcaacaagacctttccaacagtcgtctctgccatgaaacccctgcaagccacagtccctcaaccctggttcctaaccaggccctccgcataccccctagcctgtcccattgcccccggctggattttggcttaggatctagctccaagagacccaggtcctggagggcacaggtcttgtgtagtggacccactgctacagccaggcctggctcagtggcagggcacatccggggtccctttggatggcactgaagaggccacgtgaacggttccctcattcccctgggaatctgtctgctcttggtctccctccaaaacatccacttctcctttcagacaccatcccttttctgttagttgatatttatgggtaataagccaagcacatccaagccgaggtgaaatgcctcttgaaataaatactctccccagcaaacaggtccatccatccaggcaggatgggctttgctggcagccagggaagggcaggcaggagccctgggagcaggagggagaaggggcttctggggactctgagggatgaaatagggtggggtacggggagaggtgggcgcgtcaccgcatttggcactgtcatcaaaagtagaaatggaaggtatcgcttctcaacccctcagactcccatcacggcagagatgaagcaggtcattttaaaggctggctctggagtggcaaagacagaccatgcagtgcagaagcctctctatgtaagtggggagggtgaggagtcaaggtcactgaaagtcagcaaagcctccgtccatgagtgctggggctaggatggtgctaggacatgaggggagcctgggccaggctgcagaggtccaggacatggatggggctgtccatgtgagctggggctcatcagaggtcatcaagccccctgcctcacctcttagcgggaccacctcactaaacccatcctcagtttatggcagcctctcctggtgtcagtttcttctcagggaaagggtcattcagtggggccgtgcagggcaacactgagctccacacctaagggatggaaaaataactccagcttctaaatatgtcccctcccatgaggactgtagcctatttctacttccggaggtgacctctcctctgttacagattcataggacctggtccgtgcagagagcttcaccccaacacacattctcaagtacggcagataaacaggtattccagaacacacacacgcacaggcatgtatgcacttacacatgtgcacatatacacatgcacatatatacatacacaaacatgcatgcacacatgtatacactgtcaaactgctcatagagatccaaagctccacttgcacagccacacaatgaaacaaaacaatcccacacttcgttcctactcttaactgccagaaaagctgggggtacctttcagatgccagggacaaaaccaggaagacaggcgaggctcttcttcacccacctaaattccttccgaccatttctcaaagacccacagcccagccttttcatgctgctgcccttcactcttgcaggggacactcatggagcctgagactgccaacctcttccccaaagcccacgaatagaatatggaaggaaggaaggaaggctcttagacaaagaggtcagggtccacttctccgtttgatctccccagctgcaaaggggcagttcagagcttgctaggcctgcctggcaggggaggggaatgaaggggtgagaagtgaagcaggcagccagcagtggccagcatcctctgcggcatgaatatcaggtcatgaaatgcaattagggctgcttgtgcctaacctcccttcctctgcagctccccgtgacttggcagactatttggaggacgttccaagctccattagtttagcatcctttgaccttgagggtctgctactgagcacacatccaactggctgccttccatctgcactggggcaagtagggaccaggctttgtcacttttctgaagaccaagctcttggctgaaccagtctcctgagggtctccatcatcctcccaggctacaagtgcctcttgtgtttcgagctggtgagacctcctctgcccccaagctctatggcaccaagatgacctgcaagccactcctctcctacagagtggactcctccacacgggaaagggctaagcagcttccagccttttgtggagtaggtgtttgataagaagtattgcattcgtggatgaataaacgcacagccctggaggagaagcctcttcatgctcatctcctttattttcttctttccttctcctcctgaaagtcatatcctctcctgcctgtaagctcaggtgctgtgttctacctgcttgccacactactctactgagcaggctcccgctgctctggaggacacactccagtatctgttctttgctttcttctcatgtcatttccttttcctcaggtccactcgggaggagttaagatcaggattggaggaggggccctgccggtccttcctcctccacacactcctcacctcaccccgcagctggatagaatagtgcctctagctggcctcgcagtgtccggctgtcatccactcgacagtccccagggtgcttccggcccaggacgccaggctctgcacggggatctccaccccaccaaccccgcttgttttctgcacatccataccatcctggctgagtctgagaactggccacaatgaaatgcatgacagaagaggaaagagccttccccaaattgtcagactgagccccagcctcaagtacagagaaggggataagagaatttcacccttgggtcttctcagccaaaaccttctagcactggaggcaagaggaggagaagacaaagaagaagggatcctcttttcccccaaaacccggtgctgacttgagcttccccagccctgcctcccaggacagcatctcacctttcagacctctccctaccacctccttcctgcccacttagaaacctgctctaggttaaccctggaaaggaacaggtaagtaattcatactagagtgtgtattactagagtatgaatcactcaacaagaacttgatactctcgccccaggtgtgtcttcctgtgacaggggctgatgttttcgacctgggaaggcaagtaacttccatctcccatgcccggtctagctggccccggctgcctagagcaccccgggaagactaggaaagtcttctgaagccacctctgggctcaatgagaaagagtacgctgatcaattggtgatgtctgccatggacacaggatggggagagtcctagtaggttcactcggtatttgacattccagatttaattcaaaaggacttatgtagtgaaattccagaactgtacatgagccctgctctaattaggccaatgaggtgagcaaaggctggcttggccaatcctggctgtttctcccactccccacctgccgcagttggctaaactgaaatcagagagaaggatgctctgctgcagccactgggctcccaaaacccatgcaaggcacactggaaagatgggcaaccactggggtcaagcaaggctgaactctctctgggccaaaaaccgggtatggatgagtggccatggaagaactctgcccttctccgttcaaggtcagggttgggtgaggtatgtttctgatttgattcctccagcctgaacagtggttctcagatgtcaccgcacatggaatcacttaggaagctttttaaaaacagatacctgcgcttcagccccagaaatgctggcttaactggtctggggtgcagcctgggcttacagaaatgttaaaatctccctacgattctaatctttcagccaaggtcgaggccactgggctgagttttgagaaatcgtttaggccagtgtttctgaaactaatattcattcaaatcacctgggattgtgttaaaatgaaaacttttattagactggggtgagggcccagagtcttcatctataacaagctccccagtgatactgatgctgctggttctaggaccacactttcaggaggaaggatttaggccactggttctcagagtgcagtcccctgacctggcagcctcaatatcacctaggagctccttagaaatgcaccttcttgcgttctatcccaacctactgacttgggaacttgggggcacacacaagtgtgggaaccaatggtcactgagaggggccagtctcctgcttccaggacacacctgttccccaggtctgcaggatgccttcagaagagccctcttagatacagctcccttcctggtccagccagatgtgtgtttgaggggtggtgagaacaagtgtaaaggaattaatgagtccatatgtcaatttttggccaggaataaatgcacacagtaaatgcacaaacgtctagttttccaaccctgagggagaaggaaaaaagacacctgaaaaacaccagcaatggagagatgaaattcaattccaaactaaaaatacacataatttatcattatctagaaggagattgggtgaaggccattagcgggtattttctggttgatgctgctctcaacagcatgagtggcgagccagaagggttactgccctacatttccctttgctgcagttacgcagcaacaactccaatgcacagaaggccccatgctgcttcctcccaccagaaatgatttcccattatctagtggctggtgggtagagggcatcagggctccaaaggtaccagcctcctgaggggcaaagccacctctatttctcagaaaaagaacttaaacccagcagggctgctgcagacagactaccccgggggcaggggcccaggggtggtagcggggatggagtacttttccacagcgtcctggcatcctgggtctgcccaggaaactctaggggcttgggcttggtggagaggaagcaggagcctccaggatgactgtggctgtccccacctgtccacttcctgggatgcaaggaggctttgcagaagaatgtaagtgctgttgccctgacaggcagatgtgaatcggaactaacctcagaatacaggggaagagcccaagagaggaagtggcaagtttcatgtacgccaacatcctggagcacctgctgcatgccaggcactggggacacagtaaggaatgggacagagttcctgccctcgtgttgcacgcaacccaacagccacctggtcaagctgccacagatgtgttcactcatcggtaaggaccaggatgcagcctagctgttgggtggcaaggacacctggctcctggagctgccatgatcccaaatgaccttcatcccagtctccaggatgctggctgcatttctcttcctgttctttcctgacagtctggctgctcccagatccccatgaggtttctgtcttcgtattgccttgtctgtccataaaccccattacatgaaatagcctgtgtcagcctccgggcctaacaacctaaagcacctcttatcagctgtaggtcaatcccttaaaatgctgttatgaagacaaaatgaaaaccagtcaacaaaaatgaagagttgaaggcagcaagtaaattcagcaaatggaccctttggaggactggccatggggtgcactggatttcaggaaaatgacctttgggaaattgggctacctcacctcaagctccatggagccccaggtcgcttttggtcttgggcaaagtctcttctggaagccaggcaggtgctctgttcctcactcagccccacaccctgtggcttcccagaaaagacctcattccagctgtagattatacccagccttgactcactgaagaagttcagaaaagactttggagcctcgaagaatggaaaggggaaggaagagatgcctgagaggacagcctgtgaatactgtcccccagcacctatttaagccacgcagtggcacctcctccccacaacagcagcccccagagaaagctccagctgtccccagcccttcttttcctgcctgatcacgcagggctgtcagggcaccggttggagatgagggacaagccagggtgcgcacctggcccactaacaagtcatccccctctctgtgcaatgacaacccttgtcctatgaattacgttttttttttttaatagcttttgacaaatggggtacgtatacaccatggaatactatgcagtcataaaaaggaatgagatcatgtcctttgcagggacatggatgaagctggaagctgttattctcagcaaacgaatgtaggagcagaaaaccaaataccgcatgttctcacaagtggaagctgaacaatgagaacacatggacatgggcggggggggggggggcctgttgggagttgggatggggaaagagagagcattaggaaacatagctaaaaagaaaatagccaatgcatgctgggcttaatatctaggtggtgggttgacaggtgcagcaaaccaccatggcacacatttacctacataacaaacctgcacatcctgcccatgtactccacaactaaaaattacaattaaaaaataaatagcttttgacacctggtactgctcgtcacaattagtcctaagagtccccaaactccagccagtggtatccctaattattggtgaattattgaacaccagtaattcactctgctttcctgagctcaatctttgagggcaggagatggcaaaggtctaggaaatgacttaagaatcccgaaggagacccaatctgaccccctgccaagcctcccaagtctaccgtgatcaagttcctgctctcacctcctccctgagactgcctggccaggggtcatggcagctgccagctgctgggtagaacagaaccttccagccctttgaccccactcacctgttctaaaagggagcagacgcagtgttctctctccctgcttctcgcaaggtcacgtgatcccatttccacccctctagctgctccctcctcgttgtctttctttgaaagaaaaaaaaaaaagcaaccttaatgaggtataacttaaacatcataatattcaccactttaagtgtacaattcaacaaattttaatgaatgtgtcatcaaaattgctccaatttgatggtcctcttcctctgcctctggataagagctggtcttcgtgccgcaccttctgtgcccgcgacgacacgtgtccagaccttgccgctgagttccagggacctcaaatgcgggacgtcacaaattccactcaccaaacggactcctcctctgcactccctaccatcgtggatgacactgtcacccacccagtgcccaagcagacaccacccagccatgacccaccatccttaacgggcctagagctcatgctctgctcttgggcgacgctggccaaggccaccatcatcactctgagctgggttcccacagcgctgccacctggtcttccttcctgcagtcccagccacccacccccacctccagttggccagcaaaggcatctaagacacacatgccatcacgctgtgcccggtttaacatcttttttgagacagggtccaactctgtcaccaaggctggagtgcagtggtgcaatcacagctcactgcacccttgaccttctgggctccagcgatcctcctgcctccgcctcccgggtagctaggaccacaggcatgcaccaccacacctggctaattcttgtattttttgtagagacagggtttagccatgttcccaggctggtcttgaactcctgggctcaaatgatcctcccacctcagcctccctagtagctgagactacaggtgcgtgccaccaggcccagcttttttttttttttttttttttaattttttgtagagatagggttttcccatgttgcccaggctggactcaaactcctgttctcaagttatccgcctgtctcagcttcccaaagggctgagattagaggtgtgagccactgtgcccagccttcacatcatccagcagctccagtgcctggggtaaggtccagtccccatgctaaggctctgctgccaggtgtttggctgaggtccccttgtcacctttggaaatgcaacagttgtgggtggccccagtctctgtcccaagaacatcagcccagacccttggtcagaaaagactcagaacagattcagagaagccaccagttctctctgcctcacagtgtcccactgggtctgccaagtctaattccgaattgtatgaactgaccactggtttgggcatcgactcgtccaagcttcagagacaaacagcacaggtttctggggccctcaccgcgctgtagctcccttacctcatccacgtgccgggactaatcgacagcttagcctccccactctcaccggttgcattaagacagagagagagcagctggctttgcatctccaatgggttaaaaaagagaaggcaattccatttacaaaataggattacaattttgcagaatcctgctggggcctgggggaaactttgaaaacacattcattttgtttcatccttatcagagccacctgctctcccttcccccacaccagccatcttgattactcagagaccaaggcatgagcaggagctgctggtaccccagcctgcaaaggtgtcgctggggctcctcagccatttggactcctggctgggaggctcacgtcctcggtcaataaagtgcccctctggagagacagaggcaccagcagctttcccaccacagcaggcctgctgagaccttggcccctccccgagacctccacagaaccctgaacctacaactgaggaggaattgatcttcctctgaaactgtttgtctacaggaaaaaagaaacaagccaaagaaaagcaagggcaagggaatcaagttattgcgacaggtgttcgggctcccgaaataataaacatgttgggtaagttgcagtctcactgtggaaggactcatcttgatgcaaagcctttcttccctgcaccagagggggaaaaaaaccatagtaaacaggaggtgggggaaatcaattcctcatgcacgttgctcattgaatgagggaatctcaacccaactctgtcctttcctgtcttctattaactttgtcaatttcccacctcctgagttgctggctttgcatgatgaggtgggtgaaggtttggggaggtgagctggagaaagttgatggccccttgggctgggccatggccttttaactctattatgttgggatggggggctttgtctccagattggctgcaagaaatcacagaaaatgagggaccttagagagcacctatttcaaccaccttattttacagattaggaaaataaatctcggggagtttaaggtctcacccaaggttgtttagccatgagccacagaggcagcccataaaagagctaaatgaatggcgagtccagtgggcaggtactgccccggagcagagggaagcgcttctgcagctccttggattttgttgcctgaggtcgaataaagaactcttaaagggataatggctcagtaactcaggtgctaaagtaatggaagcgagagggaagatcacctcctgactctcaatctctgggggacagggggcggtgggaacgagaaagaattgatgggggcctcctcctgtgtccctgaacaaacagagcacttgcaagaaaagtgcttaggaactaatcacccctacgagtgggaggggtgcccttcagatggtaaatctccccattaccaaggacgcttcctttattgtggattcgcagtctcctcagagaagcatccaaggagcttggcatctcccttgctcctggtgagaccggaaggcaggctggtccccagctcttcagagtggagctgggaagagctgcagctgccccaacgctgggaagtcaccagtccttagggttgctacgtttagcagatgaaaattcaggatgggccaggtgtgatggctcacacctgtaatcccagcactttgggaggccgaggcaggtagatcacctgaggtcaggagttcgagaccagcctggccaacacggtgaaaccctgcctctactaaaaatacaaaaattagctgggcgtggtggtgggtgtctgtaatcccagctgctccggaggctgaggcaggagaatcacttgaacccgggaggcagaagttgctgtgagccaagatcacgccactgcactccagcctgggtgacagagcaagactccatctcaaaaaaagaaaaaaaaaaaaagacataacagccaggtaaatctgaaaaacagctctaactgcctaacttgtaatgttttggtgagagacagctaaataatatttagggtgttccaacagggtcaatatgggtcaaaggacaacatctgttagctcagaagaaatctgtcagcacagagcatatgcgttggccgggcacggcggctcatgcctgtaatcccaacactttgggaggccaaggtgggagaatcgcttgagcacatttcaaaaatcagcctggacaacatagggatatccctgtctctacaaaaataaaaaaaaaaatgagccacgcctggtggcacgtgcctgtggtcccagctacttgaggggctgagatgaaaggattgcttgttgagatcaagggtgcagtgagccgtgatcacgccaccgcattccagcctgggagacagagcaagaccctgtctcaaacaaaaaaaatgtgtatacacagggcccctggccaccgtccccgctcgaaaccccacgcaagtgtgtgggaagtgccctgccccacacacagtaatctgtctgctcctcccagggtgaactccgtatgaatgacagcctggcagtctgtgtgtgcttccccactagggtaggggcccagaaaagggctctccaaagtgggctgataacattttggactgttaagtcttttcatcctagggggccttcctggtggaagcaggcttcaaagaaagatttatgtacaccacagagctccagcatctcctacatttaaaagtctgggacactctcaaaggaccaaataagttgcattggaacaaaagtgacaaacaggaaggcgggataggtagggggcgggtagtgccatggggcttggacactgtggctggcaagtcatttcacccttctgaaactggtttttttaattttatagttaaaggatcttgttatgttgcccaggctgatctcaaacacctgggttcaagcgatccccctgcttcgcctcccaaagcgctgggattccactggccggcttgaaaccctcttatttgtgggatgaagactgcccagcccacaggttgttttgaagatcacatggggtgatggaaataaaaatgctttcaaatagcaagctgcggccgggcacagtggctcacgctgtaatctcagcactttgggaggctgaggcgggtggatcacgaggtcaggagatctctcgagaccatactggctaacacagtgaaaccccatctctactaaacaaaaatagaaaaattagccaagcggctactcggaggcagaagaatggcgcgaacccgacaagcggagcttgcagtgagccaacatggcgccactgaactccagcctgggcgacagagcaagactgtctcaaaaaaaaagtaaaaaaaaataaaaatagcaagctgctacagaatggaatataagctcctaataaaattggacatgacctgacaccgagtaccaagctaaacacttcacgtgctttatctcagcgcctctcagttaatctcatcgtcacatgcctatggggccaatccataacttcttcactttgcatctgtggagctcagaggtcttgtacggcctggccccacagtcggtaaatgaaacacagaccctggccgggtgcggtggctcacacctgtaattccagcactctgggaggccaaggcaggcagatcacgaggtcaggaaattgagaccatcctagctaacatggtgaaacccggtctctactaaaaatacaaaaaaatcagccaggcatggtggtgggcgcctgtagccccagctacttgggaggctgaggcaggagaacggcgtgactccgaggtggagcttgcagtgagccgagatggagcccccacactccagcctgggagacagagtgagactcttgtctcaaaaaaagaccctgattccaaacccggtgttcattcattccttgttcaacaacgattcagcaaatgtttgctgccatcagcagagttcagggtatcaaaaagaaagcagtggatgggagacacccactcttgctctcataaaactcagtctattagaaccatcaccacaggagaaaggataattttccaagcatttacaaggcaccaaggaccgtgctaggtactttccatgatataggaactaatgttattcccattatttcaatgaaaaccgaaattcaaaaaggcgaaatgataaacccaggtcacacagctacggtggagcttggatttgaacccaagtcctggactccagaggccttattctcccttgctgctacgctagagaaacaaaaagctttcattgtgatgatttaaagcttaaccctcactataaggatagtgaccccatatattaccatgttgtgtctggaatttgtggattcttggtcttactaacctcaagaatgaagccgtgaaccctcgcactgagtattacagttcttaaaggcggcgtgtccggagtttcttccttctggtgggttagtggtctcgctaagcttcaagagtaaagctgcagaccttcatggtgagtgttacagctcataaaggcaatataaacccaaagtgagcaatagcaatatttattgcaaaatagtgcagagtgaaagaacaaaccttccacagcacagaaagataaccaaacgggttgctaccgctagctccggcagcctgcttttattctcttatctggccccacccacatcctgctgattggtccattttacagagagcccattggtctgttttacagagagctgattggtccgttttgacagggtgctgattggtgcgtttacaatccctgagctagacacaaaagttctccacatccccactagattagctagatacacagtgtcgattggtgtatttacaaaccctgagctagacacagagtgctgattggtgcatttacaaaccttgagctagatacagagtgccgattggtgcattcacaatccctgagctagacataaagattctccaagtccccaccagattcaggagcccagttggcttcacccagtggagccgcctgcccgcccggcgccgttcgcccgcactcctcagcccttgggcggtagatgggactgggcgcagcggagcagggcgcggcgcttgtcagggaggctcggaccgcgcagtagcccacggcgggggcgggggcgggggcgagggcaggggcgaggctcaggcatggcaggctgcaggtaccgagccctgccccgcggggaggcagttaaggccctgcgagaaatcgagcgcagcgccggtgggccagcactgctggaggacccgacgcaccctccgcagctgctggcccgggtgctaagcccctcactgtcggccggccgctccgagtgcgggacccgccaaacccacgcccggggaactctaccagcaagcgctgtgcgcagccccggttagcccccgtgcctcttgctccacacctccccgcagcctgagggagccggctccagcctccaccatcccaggaaggggctcccacagtgcagcagcgggctgaagggctcctcaagcgcggccacagtgggcgccgaggccgaggaggcaccaagagcgagcgagggctgtgagggctgccagcatgctgtcacctctcaatgtcaggttttcagagtctaagtttgtgaaatttagaaagaagaggagaatcgctgggtatagatgtaaaacaatgctttgtaggaaggatctaacattttctttcaggatgagggcaggagtgcgtatctgaggctttggctcaaagacaaagagggagagagagggcttcacctcatgatctacaacatttccacgatgtaccaccgcgtcccggctccccgatccccttggaagaattcgttctctcggtcagagcgacctcgcacgctgatcggtcgagggacccgccatgctcagggctcagcacccccgagttaaggagacaagagcagccatctcccggcccccaagcacccggactcacacccgcctctgctgcgacttcaccaaggaaggaaaaatggctcgaaatgcctgtacattaagaagcgtataattatgcataataaaaagacgccggcccttgtgtatataaacacagctttgactgagtgccttctcccaggcagcccttctggctctcaacagcagcagtggaacatcttaaacatatggtcgccatccaggcctccaggcagatctgaactggggagggggtgggggcaggggcaggcgggaggtggagacgggacggggatacaggaaaatcaggagatggttgtttggggaagagggttacacggagagctggtgggccaggggtcagacatttacaatcaggacataatctgtgacctgccaccccaagttgagctgtctttctctctccctcctctgccccaggctcaatttgcccccaaagacaataatagggagttctgccacctgtctccggggagcgggaaggagagctgctgagtggcaggaatatttcctggttttgatttggggatcctctcatttctgtttgcactgatttcagcacctgtcacctgcaaggcgctgagtaggcaaggagggaatcccccagtggataagccacttccgatggtgtagcagttcaacaggtgatcaaagacacccccaatttcagtcaagctcccaaccttgggttctccagcctcaagctttgcctggcctgcccatcagggtgtggtcttgctgccagctgctcctgaccagggtggtgagtcttcaggctggtgctcagcctcccccgggccaacccggagtttgtgcagtgcccctcaggctcctggagaccccatgctgcaccatgaaagggcctgctcaccacagtagagggctctgttcctagccttccccaccatcaccgccacctccccacacaatccatcacttctctgcaaagctggacagcggagcaaagctggctccgaactgggaagctggggagccagtggagctggtctgcgcatcctccttgggccgtcactagcaggcctgtctcaggcagatctgtggtccagctatgctgtcgctctatttggggtggggggcggtgaggaggaagtggatgctggaggggacagtgcttggtctcctcatcctgcagcatatgtagagtcctctccacaccccagacaaactggagatgctggtcctgaagcgaagacttgggtgcaagtgttttatttgggagatgaccccaggaagcaggagtgaggggcaggaagagtgagactcggaagggagaaaagcaaggaggggtgcattcttgggcttgtcactactgtggacaatgggactcaaccccactgggacccctctgcaaagccaggcatggggtgccttgtaatggttcctctggaagaccgcagactaaggcattttcccacgggcccctgcccatgggctgaggtttgattctcctgcttttccaactgcacctgcagggacactccttcctgctccggggacagccccaggcagagactcggggtgcacttgaggttgggagatggtttcagcatgcatggactgccccccacagctacagacaaatcagaagtgggcgaggcatgcagactcagagcacggatgggtgagtgaatgaaggagtgaaagagtaactttaagacagtttcagggcgtggacctgggagtgcaaaagcagcctcctctctgcctgaggatcacctctgtgtgagcctcagctttgtctctggaaaggggacgatgcaaagccacaggcagagcatcacagccaggacagcagggatgcgctaagagggcactaggctctgggagcaggagaaatggctcaggcaggagctgcaactctctggcaccacgctaaggagttaggactctattttctaccaatcacaggcatgtggggacatcctcctactagcaaagccaggagatgtacagtctgtggcttgtgggaggcaggcgtcaggtcagggacaacccctgccaaggagaggtaacgcccacatcccctccactccctccacccacacctgccccttgctgtgcagacacaccctcatgctggccgtgacaatgagaccaagaattaagtccctgggagtcagcaaagttttctaaggaaaatgtggagatgatctcatattagaaaaatcagagagttaacaagagagcgtctgggaggagggaaaggaatcagtgtttctcagctagctggcaccagactcccagggcacttgaaaggtattgggcatttttcctttttgctatgaccggggagggcactcctgaatcaagtgggcatgagaggcatcctgcgatacacacaacagtcccccagcagcaaagagcggcccgctcagtccaggggccagtcacagttggtaaatgaaagacagaccctgattccaaacccagtgttcattcattcctttttcaacaacgattcagcaagtgtttgctgccgtcagtagagttcaggatatcagagaggaagcagggaatgggagacacccactcttgctctcatagaattcacagcctattgcaaccataaccacagaagaaaggatcattttccaagcatttacaaggcaccagggacctggcgcctgggaaagccaccaggcttccaggggcccctgttactctcctcatgacccaaatgccacagctcccccattgaacacccctgaaagaacacttagaaacagcccaggggaatgatacaggggggttgcaggacttcccattcacccaggaagaggagtgggaggcaggtaactgagaaaggatggcaaagcttctaggctgcatgcccagccggctgagtgtttagggatacgagagaggacagcaggtgaaaggtacctgaaatggggttagagggagacagtcttgatgtgcagttgtcacaggaaaccgtgaaggagctggtgtgagcactgctgagctgggccgggtctctgcagaggcagaaacgagagatgaacaaacagaaccgaccactcctttcggacccctctgcaacatggtcgctgcagctcgggcggcactggacaggtgggcgccacagagcgagggggccggcagagaagggtgggactcccttgcaattctgacatctcccttcagctctccatccagagagatgtttttatgtaagcagtagccagagagggattggagatgctaattccatttcattagatcccagcagctttcgattacagcaggccggagggaggaaacagagccgatgtgtttttagaagccgcagttttgttctgtttttaatttaatgctgctggtcaaaagatgccaccttggagtcgctaatgattcgcgtgaattattttggttgatttacacaccccttcgactttaaataacaagggaggaaggagagctgggtcccccctggagctgtgagcctgcagctggaagaggatgctgccgacttgagggtttcttttttttttttttttttcaattgtttcctccgtgcggggctgggccctgggcatttataaacagggcacaaacttgggacaccagacaccgtcccccttggaccactgccctccaagccgtgtcttgcctaccgttctttccccaaaaaaagccagtggttagtgtattagagttggtacaaggtgtcagacttaggacgaagatcttatatgcacaaactctgatgctcacatttatgctgagaattagtgtgacattccctgtgtccctgaggaagaaaacaaagctctgagtggtttaggagcttgctcaaggctgcctcactaggaagtggcagagacagcaaccaaactcacgcacagcagggcctttcgggtttggttcagtattgcacctggagtcctacaggaaatgaaagagtaatggacccagatttgtctgaatccagagtcgaagcccttcccatttttctggaggaccagtggtctccaaagggactgggctgaccagaaaggccaagaccaaaggctgaagggagtggaaccctcccttccagacccccagcatccgatgggcatctgagcagcagcttcacccagggccgcctggcaggggtttgatcatgtgcctgtctgccaggaaaacagtttgagggttggaacaagtgtccaaaaggagccttcatttatcttgattcccagctcatctccatcaggggaaacgtctcctgtctgcccctgcccctctcttttttcttcccttcaaaataaaattagaggcagccgggaagagcattaagtcctttccaaatttccctttctcatccgtcatgtccaggccggagcttcgaggctgcactgggaagtgagggtctctctgctgggagcagcaaatggcagacagggggctggcaaggagggaggaacccagctcaggtgaccagggagaggcctggcttctccatcatcaggcggtcagggcagctgcatatgtgattcaggccagcaggaggctttgaggccggctgggccaaggcaatcaggaaaaccaccagaatcaggaggagagaaatagaggcccccggaagcctcgtgactttcccatcagggaggagcaatcagtgtatatgcaaagtgctgcagattgacatcacaggcatttcatccggggactcaagccgggagaaacagggactacaaaggtggaagtcccaggttcaaatcccagctctgctacttactagttctgtggtctcaggcaagttattgcactcccttcaacctccatttgctgatgaaaaacaaacccggcaggaagcggatggcacctgccaacaggctgaccagagggccttaaccaagggaccaggagcagctacataaccaacagatctggagcaaagtgaaaatgtgagccccatggttaaaaagtgttaagaatttcaagatgataacagcggagcattagaccaggaatgggcccttctaagcgccgggcccaggatgacgtcatgggtcacaggcccacaaagctggccttggaaggggctttttaccaagatgtgggcagggtttagggaaaccactccttgtgcgacaagtgagtggcctggagaaagcatagctgtcccttcgctgtagaaggcctcagaatgggaacagagctttgacaggggtcggagggctggggaaattcccaccctctctctgtgacctgagtcgggagcctagtgatgcggtccacggagctctgcctccgagcgcagagcagcgggagaagggctgagggtggctatggggatgagcagctatctgcctcgctgggaggacctcatgaatgtttgtgcatgaaggcgtctagcacaaggaggccctgtgagagctattcagcttcttcctggagcactgatgactttcttgttcctctgctctaacttgcttcctctcttgagggtggacccactaggagacgtctttccactccctgtggcatctcccagctgagaacacagccagtacctaggtaatggaagtcattgaatgaatctggttgtgagtgggagccaccggctcaagctctttcacagtgaatctggtgctgccctggaatctgcattccctggtgaacaaggacaaggagggagacaccgagcaggccagtgcccaccaagctctgagtctcatatgtcaggtgcaagccgagccccgcaggacacagcagccacaccccaagaggtaaagaaagggactaggatgaaagtgagagaactaagggcagagctgagggggctccaggtggagggtgaggctggtaaaaattggggtgttccggaagccagatgcggtctgactccctcctgcaacccctcaggggaagcccctgtgaggggcacaaacactctcagcactggaaaccatgcggtcacaccgccaacatgttagccaagtgccatctgcctaggaacagcctccttctgtgcagaaagcttgtcatgcctcctggtggtgccagctgcaggctgtgtgcttgggcagctggcactacccttggacctgctctccccttccaaggaagacagtgaccttgccaaggtgaaagtatgaaaccaagcacagggctcccagatcagaggtgtggctcagcaacgctctaaaattgggtccagctttggaagacccagtgtcctctctgctggtcaggcaaggtcacaccgccaggggctcagctccccagatgccctctgtgcaatgctgagccctgagctggtgctttacttctccacatatccacgctctgcctctccataatcacggtttggttccctaagaagcagttcctgagcggatttgagcacaaattgtttatttgagaggtactggctatggggggagccccagcaggagagcagggaaatgacccagagaagggaaggcagccagggaagggctgttctaagcccactgccaaagtgggcactagggctgcatcctgtgaggaaactgagaaacaacgcaaaacacaggatctggaaccatccactcccaaacctacataaggggtaagctgagatgtttatatgtcaactcatgatgatcttcagctgagggctgcttctgggagatggtcattctaggcttttctggggcctcccaatgcaggggttggaggtaccaaggctgtgagaggccaaagctggcagttgaaagttagcccaaccgtgcaaaaagggatagagtcataacacttacagtgtccgcttcaccctctaagctcccctgtgcattcatagcatcccaaaagcatttattaagcacttccagtttgtaccaagtttagaagaagatccaaagaagactcagttatgtctgaacctaatggtcagatgggcgcacagcaaagccatcgccgtgcaacctcacagcaaaggcaagccaacatcagagcgcagaagagggagtagggaagtggagaaagcttccataaaaagagaaacctttgctcctgatggcttttaatatcacctatatgttaataactctcaaatttatatttcagcctgaactgcttccctgaatttcagacttgtagacctgactgcctacttccttctgcttgtatgtttcatgcagatctgtatttgttatcttgctggctaacaaatgaccccaaaacttagcagcttaaaacgactggcatttatgatctcacagggtttctgagggtcaagaatccaaaagaggctcagcagggtggttctggtctggagtctctcatgagactgcagttgagatgttgaccagggctgcagtcatctgaaggctggactggggctggaggatctgcttccaagatgatgtattcatgtggctgctggctggagacttcaggttcttcccacacaccctctccatagggctgctcatcatatcacagctggcttcccccagagcaaataacccaagaaagaaagggagacagagaatgagacaggcagggggtacagtcttttacaacctaatctaaatactggcataacatcacttctgtcacattttattggtcacactgaccaactctggtacagtgtgggaggggactacacacaggtgtgaataccaagaggtggggcctggccagttgtagtggctcacacctgtaatcccaacactttgggaagccaaggtggtcagatcactcgagcccaggagtttgagacaaggctgggcaacatggtgagactgcatctctacagaaaaatatttttttaaatgtatctggatatggtggtgcatgcctatagtcccagctactcaggaggctaaggaggaggatcacttaagcccagcaggttaaggttgcagtgagccatgatcacaccactgcaccccagcctgagtgatggagtgagactctatctcaaaaaaaaaaaaaagaaaatggttatggtcactggggtcatattgaaggctggtgaccacaggatcttaaacttaacatgcccgaaatggaactcccaaagtttctgccttcgtgcacaaagccatctgcactgtcttcctcatctcagtgagaatggcaaatccatctttccagctgctcaggccaaacacttggagacatccttaactccttcccttccatccacttacatctaatccttcagcaaatcctggtagctgtccctttaaaatatattggaattctgaccactttccaccaccctcattgctgccatcctgatttaaggcacctgccttatcatctctcacctggatgattgcaatggcctccccagcagtctccctgcttccatctttgagccccctgcagtcatagtgatcctgttaaaatgcattactcctctgcttgaaaccctctcatgagggcagaaaatcctcacagggcccttcaccgtctgaccccaccaccaccatcctaatctcacatcctatgactgccctgcaccctccatccggcccccctggatattgctagcatactcctgcctctgaccctttgcacttgctcttccctctgtctagaaagctgttcccaccactatgcccggctaattttttgtatttttagtagagacggggtttaaccgtgttagccaggatagtctcaatctcttgaccttgtgatccacccgcctcggcctcccaaagtgctgggattacaggcgtgagccaccgcgcccgccctgtagtcccagctactcaggaggctgaggcaggagaatggcgtgaacccgggaggcggagtttgcagtgagccgagatcacaccactgcactccagcctgggcgacagagcaagactccgtctcaaaaaaaaaaaaaaaaaaaaacaaagaaagaaaaaagaaaagaaaagaaagctgttcctccaggcatccacttggctggctcctcattgccttcaagtctttatgcagtgccccctgcttggaaggccttccccgaccaccctatttataaacttcctattcccttctttgcctttgttcttcttcttagcatgtttcaccacctccaaaccatctattttatttgtttttcttacttgtctgtctcccccacagatcgtaagctccatgaagatccctgtctgttttttcactactctattcatagcatctagaattgtggctgactcattcaggatgctaaaaaatatttgttgaatcaccagaaggagggaacatgaagaaaagtatttcagttatctaccacttcatacccatccaccttaactaggatgcctaaaacaacaacaatcatgtatttggctcctgaatatgcaatttgggcagagtctgggaagacagctgatctctgctcacatgacataggctggggaagctcaaaggcaggggtgacccaacagtgggggctggagtcatctcaaagccatcactgctctctggtggttgttactggctgtcacctctgacctcagctgggttcatcagccagaaccctaccctggcctcttcatgtgctgttggcttcctcacaatacggtgagttctaagagcactgccccgagaggcaagtagggcaagcttcccatttctgaaggccttgtcccagaaacaaatgcagtgtcattgccaccattttctaccgatgaagtggtcacagagcctggattccaggggaagagacatagactccaccttccaatggagaagcaacaaagaattgtagggccatgtttttaagaccaccacataaaggaagagaaagaaaacctttcccaggccccccgacttgtgccgagctcagcgtaggatgtttgcaatcatcaatacacaggtaagggcttgcccgcatgctgtatcatagaaagcggcacgcatctggtgtgcttctgtcctggcccatgaacccagcgctcactatgaactcaaacgtctttgctgtaagtcacactgcctttcagagatcatctagctttcttgttgtaagattccaggaggataacacactattccccagagaaggtattcagtatcaggccagggtgtgctgagacattcccagagggataagttacagactaacccaaatgactttttttgaaggcagtgccatatctccagcccaaagaaaaagctagatcaggatttctttttttttttcatcttttttttttttttagacagtctcactctgtcacccaggctggagtgcagtggcacgatctcggctcactgcaacctccacctcccgggttcaagcaatcctcccacctcagcctcctgagtagctgggattacaggcacccaccaccacgcccagctaacttttgtatttttagtagagacggggtttcaccatattggtcaggctggtctcaaactcctgccctcaggtgatctacccatctcagccccccagagtgctgggattacaggcatgagccaccacgcccagcagatcaggatttcttaactggggttctgtcgacattctgggtcaaatcattctgtttgggggctgtcctgtgtgcgttataggatgcttagtggcacccccagcctccactctctagatgccagtagcaagtcccccaacccttctgcagctatgacaaccaaaatgtctccagacatcagcaaccttcaccttgggggcaaaataacccccagatgaaaactgctgggttagagtgatgcttaaagtattatttgcagtattttctcagttctggatctgtttgaagtcttctcccctggctcagttagagctcctgaaccctttcatcttctagacaccgtgaaccatgtacttgaccatgtggcccatttcactgtgattattggaaaacttagaatcaaagatgtttcagggtgtatcccacagggacatgcatctttagtcttatgtctgctccattttacatcatttcttctttgaccaaactcttcatttatgcaagtcttcttatattttatgcattctttttatctgtcctaaatcttttctagaagaagggagagtacaaagagctaaataaataactgcagtcagggtaaatattcatggagatgacgtcagagagaggcagacacctgcctggagggaaataggacaaacagagcatgaaggcttgtcgagaaggcaaaaccagacaggtgggagccagacgatgtgtctgggcagagtgtgggtcacccagaggggtcactctccagaggggaagattagagagaagatggacagaggctagggtgtcgaaacccctcccccaggaaaggatcttgttttgttgtattttctgtttacaggaaagtcaggggaagggaagggatggtttgttcacttgttatttttgtttcagagacagagtcttgctctgtctcccaggctggagtgcaatggcacaatcatggcttcctgtagcttcaacatcccagactcaagcaatcctcccacctcagcctcccaagcacagctgggactacaggcatttgcatttgccatcgcatctggcatttttttttctttttttgtagaggcagggtctcgctatcctcagcctcccaaagtgctgggattacaggtgtttgccaccatgccgggccgggaaggtgttttaatcaatagcgtttaccaacaacaagaccccacctgccacgtgaatgagtcaccttggaaatgaatcttccagccccagtccagcttcctaaagtgatgctgcgtggagcagaaatgggctgtccccaccacgcctacccaaactgcagattcttgagcaaaataaatgcttattgtttttagacacaaagttttaaattggcttgttgcacagcaatagataactggaacatctttaaataactgtcaatcaacccctcccagactccgtttccttatctgaattgtgagccttcaagggtccatggagtgcctggcatggggaagggcctcctctgccagcaggtgtttgatatgactgcaaaggcaggcaggtactaagccaaaacacagccgtgcctccagtacggctggaggacaacacagatgtgaaactgaaagacggtggaataagcgtgcattcacttagaaatgagggctggagctcctaccgtgtgcccagggaaggagtagaaggaagtacagaactgtgggaagcagacggcggggaaatcccacactgctcagtcctggcccatttcctccctctcttctctctccctagggttctcatctctgccagccacatcttaatttttgtgtatgtcccaagatagtctttcctatgagtcccccacctgtatatccaacatcacctcctgggtgcatcaaagaccctcaccctcaataagtccagatccaaccttgtgcccacccccacctcccaacatcaagttgactttgttctgctctgcccaggtcagacagtagcttgtccacggccacaagtcatcagctagccaccctgcctcctcctcctcgcccccctccccatatcctaaatgtcactgagtcctgatggttttgcttcctaaataccattcaaactggtccactgctttccatcccacagccgtcccccaccaccatctcctgcatagccattgcaatggcctccttaatagcctcccccacccccatcgcctctcccctctcacctgccctcacagcaacagcaagctttgtaaaataccaaatcatctctctgcttaaaactttccactgatttcctggtgcacttaggttaaaggcccatgtcctgtcactatctacagtgggtcctgcaaggcccagcccctgtgaaacccacccactccacctcctctgtaaccacctcccactccctgcactgctgtctgtgtttcagccacacgggcttctttcagctcgccaaactctctgtgctccctcctgccacagggcctttgcacatgctgttgttacctcagccgaagatgcattcgacttacccccttccaacatacatctttttttttttttgagacagggtcttgctctgttgcccaggctgcagtgcggtggcacaatcttggttcactgcaacctcaacctcctgagctcaagcaatcctgcctcccaagtagctaggcctacaagctcacaccaccacatccagctaaccaacacatacttttttttttttttttgagatggagtcttgctctgtcactcaggctggagttcagtggcacaatcttggctcactgcaacctccgcctcccaggttcaagcaattctcgtgtctcagcctccagagtagctgagattacaggtgcctcccacaatgcccagctaatttttgcatttttagtagagatggggtttcaccatgttgaccaggctggtttcaaactcctgacctcaagtgatccacccgccttggcctccaacacttttaagaagcctttcctgctctctctgaccagaccaaccccactggtaccaaatggtaacgctctttcctggcactaatctccatttaattttacattcctttgtgtgattctttgatgaatgtcttcctttcatgctaaatttaagctcttgaagattatgactgttttttggtactgttataacccaaaaagctagttcagtgccctggcccgtagtaagcactcaataaatatgtgtaggctgaggaccatggctcacgcctataatcccagcactttgggaggctgaggcaggaggatcacttgagtccaggggttagaggccagcctgggcaacatagcaagaccctgtctctaccagaaaaattgttttaattaactgggtgtggtggtgcatgcctgtagtcccagctactcaggaggctaaggcaggaggattgcttgagcccaggagttcgaggctgcagtgagctatgattgtgctactgtactccagcctgagcaacaaggtgagacactgtctcaaaataaataaatacataaatatttttaaaaaaaagtaaaaattaaatgttttggaaagggcaaaaataattgtggggcagatgctgagaggcgagatggttagtactcgctagaaaacctgggcagcattttatgaggtgggtgggacttgaggtgaccttaaaggaggggtagatttttgtgttgatggaggcatttggaaggacattctgggtgggtggaacagaccagaataaaccaagaggtgagtataacgtgtgtgtgtgtgtgtgtgtgtgtgtgtgtgtgtgtgtgtgtgtgtgtgtgtgttttggatgacaggaggagatgggccagactagcagagatgcaggttgggaaaaggtgggacatcaggtcagccagcaagggtagatgatcaagggtcttgaaggcaggtggaggagtcggcatgtgaaaggcatgggagatttcagagcagagtggtgatcccaggcaggcattcagcagggcagcgagtagcaaagcctcgcggcagagcgggtgggacacaggagtgtggatggctggaggcagagaggaggctggtcagcatccaggcatgcaccaccgaggaccaggagggagggcagagaggacagagagggcaaggtggataaggaggcattaaggaaagagccatcccccaactgggtggctgttgtctgcagaggaccacacaggaaggtccccctccacactggaatgtcaagagctggtctgtcagacagaaggcaaaagacaccagtgccatttccccagctctgacactgcatggctccatgctctgctctgtgcccccttccagccgagtggatcaataccagccatcagggctgagccaagagacggaggacaaggttagctgtctgtagggaacgcatggaacacccagagcagggctgcctgggtgacttattgcttattaataatataaatatgtaaatgttacgagggccatattgatcccaacatatgagccatccatcatgagagtgcagaacagggtgttataaatatcaaataataagtctgcagcccaagacttatcaatataggtggtctaaggctgggacagtccccaaggcaattttataatgagagcaactccagcaacctcccgccaccacccccgccacagtgtgtgtggtttgtgagggggagggagagacagaggacccctcaaatggaaaggagatattcatatgcagggattctagaaagagagcctccccttttctcctttaccatggcaggaaaagccgtcatctgagctccccaaatctccaccccggggtagagagggtttctcatccccatgtatgctgaggcaacatagcctaaggtttagcacgtgggtgtggagtcagggagacctgggcatggaatcctgccctgcccactgtttgccagcttcgtcaacttcacaagtttaactgcttgaagcattggttttactcatctgtaaaatgggaatgttgacagcaatcggcaaggttgtgaacattaaatgggtcaacgtctataaccaccagtgtccatggtaggtatgactactatgcagagtggccaggggctcctggtgccatgagacctattagcctgttctcacagtgctatgaagaaatacccaagactgggtaatttataaagaaaagaggtttaattgactaacagttctgcatggctggggaggcctcaggaaacttgcaatcatggcagaaggcacctcttcacagggtggctggaaagagaacaagtgccagcaggggaaatgccagacgcttataaaaccatcagatctcgtgagaactcgctcactctcacgagaacaacatgtgggaaactgccagcatgatccaattacctctgcctggtcccacccttgacgcataaggattattacaattcaaggtgagatttgagtgaggacacagagccaaaccatatcagaggcatgacgctgaacagctccaatccagagtgtcccatcactacctccagaagatgtgcccagtaaagtgacatcacacttgaggaaggagcagcctaaccctagccatacccctcaagccccagtttggttttcctggtggatttcagtttgaatgcccacacagctcgtgaaggcacaggacatggggctcggaaatcagccggtccttacgcggtctctgccttcgggaatttcaagctacagtgggggaagggaccagaacacctaaaacctgaggctgagcaagtgctgttggaggggtgctgagtgctccaggggcttaaagagcaaggtcatgtccagctgaggggagtcgagaggggcttcctggaaatgagccgagagtcggcagcaaaaggagggagtggatccaagctcacccaccagcctgggccccgtgcagagcaggagctggacgggatgttcctgttcttagcaaacgcggagggagcccagacctacggctatgagcctgtgcccaagcctgggagatatttcattcatcataattttttttgcgttaatgttggcttttgattatttttatattgcattaaaatattatttatcttgattactgcatttttggtgtccccttaaactttgtgtccagcatgatgcctcaccccaccctcagctctgcaagtgactgcattttctgggattattccccctgcttaccagctctcggcttccagttatccaacccactttcagctggctccaactcgaccttcctagtcttctagactctgactccatctccccactgcccaccccagcccccatggtctcacgacccacctcagtgacgatcagcctttgcatctggtggcggaggcagtgcaaggaggagagctcctgccatcaatgccttctccctagggagtacccgcatcagccccaagctgcatgctttctggcactatctggttgcccctcacccagctcctgagaggtgggcaccgtcagcctcctttgtcaggtggggaacctgaggcccagagagactgtgggactcgccagattcacacagctggttgagcagtagtggacctgggatgcggttctagcaaaatgctcttttcaccagaacccaacatttcccaaagtgtcatccttggaacccatattccaggggctgtgtatttgtgagacctgaaaggactgccttcacggttggagaagcgtgacccgcagatgtgcgtggagggccatcatgaggaagacatcaaagatcctcggcagttctacagttccaaaaaaaaattgattttaactcagcattttgcaaactcattgacctcaaaactcttctttcatggaacatctccctgggtcagttgtccatcttatatagtcaagaaatactgacctgtttttagcgtgagagttttccagccagattctgctgatgggtcctgccaggacccatacctgcgctttgaccttgtaggtgaggggaggtttcttttctcacccctagattcatggctgagacacctgtaactaaaggcagcttaataagagaagagcatgcaaatgtatttaatgtaagtgttatgtggcacaggagccttcggaaatgaagacccaaagaaacaaacccatgtattcctgtgcttaggtttgtcaaagagcggacagtcgcgcagaagtgaatgggacacataaggtctgatgttaacatcataaactaggggggctcagcaaggcccatttgttcagactcttctgtgtccctgggtcttcaggtctaaggatgctccttttctctggacacaggaagagcacctctcacattagggtcctatgacctgcttcagaggaagggcagagaattcctttatggcctgtttccggggagaagggcaggagaaggccagagagaccttcccgcttctgctgctcctcaagtgccaggtgccatattttagggtagcggctcctaaaccccatcgacctctatgctgtactccattttccgacttagcttgccttggtgtaagaggaaggaagaggagagaggggctttaggagaagcccaggaaggatgttcagattttacattaactatttctatattgtttgattgtctcacacagcacatgaattactttgtgaggagggagggaaagagggggagaaagaggacaggggaagaaggggagtgttgggccgacccctatcaactccaatggaaatggcaacaaattcaagaggctgaagaaaggacccagagccagcaaatgggacatggggttttactgggagcttatacagaggggagagagatcagtggcagcaggctggggagaagaaccgcaactgtttgcaaaaggcatgcagtttctatagcagtttcacttagcaccctctcggctcagatgttcctcatagataaggaatgaatctctgggttggccactccggattccttagctcagaactccaaaccgcattcaggtgtgtctgccatacagggtcattctcaggatgtgcttaagatattgctatcaggtgcattgactaaacgggggggaaggagagaggaaaaaagaaaacaggagaggaaagaagggagggagggaagagagaaggaggaaagaaaaggaacacaagaagagaaggaggaggaagggagagaagagaaagatacagagagaagagagaagtggggagagtcaacgtgatcctggggtttgcagctcctacagcccatcctcaagtgagagaaaatctcaggcatgagagaaggctcagcaggcacaggcgtccccctcccaagtacccccttcatcttcctcagtcagttcccacctccaccccctcccaaccaaacatcaccaatcacacatgaattaaaagccatttccaggcaagcccagtggctcacgcctgtaatcccagcactttgggaggctaagactagtgaatcacttgagggcaggagttcaagaccaacctggccaacatggcaaaaccccatctctacaaaaaaatagctgggcatggtagtgcatgccagtagtcccagctactcgggaggctggggcatgagaatcatttgagcctgggaggcagaggtcgcagtgagccgagatcgtgccactgcactccagcctgggtgacagagcgagactctgcctcagaaaaaagaaaaaaaaaagaacaaaaaacatttccatgacagaggctttgcatctgtcatgagccctgggcctcagccacacaggatttcccagtttgcaatctttttgttcaactcccctctctccccagccattctaggtagggtggagggggcaggtcagggtcttctccctgccccccaggccagggcgccattagtattcagcatcttctcggtaatggtccctcttcatgctggtttgattttattattatgccaacacacttgcttaattctctgctgtctttcttctgcactgttgatttacactgttagtgttttaattatacaattcagcactccttaaaacatgaaaaactgctcaacttttcaagcaattaaaaggcagcaaagtatatcagcagatccgagacgagataagtaaatcaagcaattaaaaatgtcgtttggtgaaaatgtagcaacccacccaaaacgagcgatgccggtgggccctcccgaccagaacttcgaagagcggcgcctcctccatctcaccttcctacccgggaacgtggtgcgttctgcctcactctccctcttactctccctgtgttgaacgtgatgcctcgctgacctcagcccagcctggctgagagggcctgcgtgggatgacctcaggacttgggcgaccacagactcaggttttaacctggtcgccgagcagctcatgaacttggccgcatttctcctctctctcggcctgtttcccatcagcaaatgggactgcaccactacgtttttgtgtgggggtgagtaaaatataataacaaaacttaccatcgtaagggagaaaaaaatatcttttcctcaccatcctaggttcacggccgaagccccagtaacaagacagattaacaagaggaaagcatagaaagcatacacatttatttaatgttttacatgacacaggagacttcataaggaaatgaagatccgaaaaaacaaataagcctatgtattttttatgctaggtttgctaaagaagtgaacagttgtggagaagtatgttcagatgaaaaagtatgatctaggccgggcacggtggctcacacctgtaatcctagcactttgggaggccaagatgggcagatttcctgagttcaggagttcaagactagcctggccaacatggcaaaaccccatttctactaaaaatacaaaaattagctgggtatggtggcacatgcctgcaatcccagctactcgggaggctgaggcatgagaattgcctgaacccgggaggtggaggttgcagtgagccgagattgcaccactgtactccagcctgggtgacagcgagactctgtctccaaaaatatatatgatctaacggtcatacactgggggcacttagcaaagcctgcttgttcagattcttctctgcatccctgggtcttcggagataaggacgttcctttcctctgggtataagggagggttcatctcacatgagggtctaatgacccacttcaagccaaggtcttgggaaggtgagagagaccttcccgcttctgctgtttcctcaaatgccaaggtgcgtatctgggtatagcatgtcctgaatgccattatcatctttgccatttttaagtgtacagcgcggcggtattacattcatatggttcattcacatttgtatggtacagtcatactgttgcctaattgtcatcaccatccatctccagaacccttttcatcttgcagaactgagactttacacccattgaacactccccattccccttctcctgtacccctggtttctaagctggtttccatggagccccggggtttaatctcaggcccctagagggctgctaagagcaggagcaggtagcagggagatgagtaagcaaagctccattttaatctgtttaagctgttaggcctctggatttgattgcatttgagtataaggctctgaagattattttttgaagtcagaaaatgactggatgagaccatctgaaagacctggattgggaaggactggctgagaggcttgagttttttctaaagaaaagttctgcccacgagcaaggaggatgggtcctgcttctctgggtctagagcaggacaaaatacactccccccaaataagctgagctcaccccaggaatccaggctcctcccaggccttaaccagttccctccctcacgaactcttggcatcgtgacttcaggccccaggggacccagagaaccagggacgctccgttgcactgaaagtgagggtggggagggtggggacaggttgggagcagggacaggaggtgtgcagcccactcatccatcacacaaagagctggaaaggccagtggtgccacccagtgcccactcgctggccaggctgtctgggaggaggatattgactcaggcaagaagggaggcaaggtggcaggtgctgtggggtgggcactgaagaagatggaggggctgagagacagcctcaacccgcagcatctggctcagggcagaacctcccagaatagacacacttccccatccttcatcagccgctgtcaggaggattataaatgtgaagaggtggtgtccagaatcttaaccatgttggtcccagcaggaagaggcaaggccagtgcccctgagctcttggctctgggacccgggttcaggtttcctacaagagaacaagcacaccctggagtgtgcctggatccagccctcccagagactctcccctgggttggcttgagtgttcaagagcagacatgtgactggaaccagggtgggctgtggcccagcaggtgacccaggaagatctggctcagtgtgtggacagggttggagctgggggggatggaagagatcataaagacaggacctgtctatgtccctgtcccccacctcatttggatcggtttgtgacccatgactacttcccgctgtcatcggtggctgggagactctgtctgctgaacaagacccagtggagagagacaccaccagcaaatagccacacttgaaaggacaccgtttccagattctgattgcctggtcccttgggtgttgttaaagggaaggtaccaggttgaaaaggaaatggcagagaagccctctgcttccttgataaggtatcccgtatctcttcccctgaatggggagattatcagattgggtaacttactatttaaaataaaaaggatatattttaaatatcacacctaggttaaaagtgaaagtatgaaaaaagatatatcatgcaaacaataaacatcagaacggtgatgtctctatattactatgagataaagcaaacttcaaggtgaagaatattaccagagatagaacagaacattccataatgataaaaggataagtctattaaaaagacatagcagccccaaaatatgtgtatctactaacagaatttcaaaatatatggaaggaaactaacaaaactatacaaagaaattgacaaatttgcaatcataattggaaatcttaacacttctctcttaatacttgataggacaactagaaaaaaaatcaaaggacatagaagatgtgaatagcactatcaatcaacttggccgaatcgatgttgatagaacattctatccaacaattgcaaagcacacattcttttcaaattatcactgaatattcaccaagatagactatattctgcaacattagtcttgataaacttgaaacattaaaatattacagcatacttctccatagaaggaaaataagaaaacatgttgaattgaatcataaggaaaatatatgaaaatctatgaggaaaaactctgtttccactcatggagacataactgctgcaagaattgccctcttattgtaatcaaccagagaactggagaaaatataaaaaacagctgttttcagatactggactatggacagaacataacagtgatcccttaaataaaagaacaaacaaggtaagccccagcttacagctaagaggatttccaagcctcagcaaagcaaggaggaactcaaacagagcaaagggtctggctaagataagaaaagaaatgttggagtttgtggaggctgagggaccgaaattgggggcataacactgggcagaaaggagacacaaagagagagagcgtgcagaagatgtccaaaagagtcactgcaaatctttagctaagcattgatctgcctctgtggggagtaaaattccacgaggcaggggaaggaaccacttgaaagcagtggattcaaccattcctaaagttcacacaggtctgggaatgtttaccaagcttgttttcccacaaaccagagtggcaggacttcataacacacaggatttcatagagtcctcagaaaggtattgatttagtagtggggataaattagctctaggctaagtgatgttctgaaaaagcctgaacaaagactaaaagcaagcctcaaagggatcaaactgatccaagttaatttaattgtatgccagaatgaaatccaaaacattttaaagaaagaaataaaatccagcacaaattcacaatgttcaacatttaatcaaaaataacaagtcatgaaaagatgtggaaaaatataacccatgacgaagagaaaacagagcaagaaattacagaaataatggcattaagacataaaagcatttaaaaatgatgacaaatactttaataggctagagtggcagtccccagcctttttggcactagagactggttttgtggaagacgatttttccacggacagtgtgggggatgatttcaggatgattcaactgcattacatttattgtacattttatttctattatattacattgtaatatataatgaaataattatacaattcatcatgatgtagaatcagtgggatccctgagcttgttttcctgcaactagatggtcccatctgggggtgatgggagacagtgatagatcatcaggcattagattctcacagggagcgtgcaacctagatccctcacatgcacagttcacaatagggttgatgctcctatgagaacctaatgctgccattgataggaagtggagttcaggtggtaatgtgagcaatggtaagcagctgtaaatacagatgaagcttcacttgctggaccactgcttacctcctactgtgcagccccattcctaacaggccacagaccagtaccagtctgtggctcaagggttggggacccctgggctagacactatgaaagaaaacaagaacatgatgaatagagaaatgaaatatatgtaaaatccccaaaatatctttcagacacaccaaaaatgcaatatccaaaagaaaaagtaaaaatgcatttgaggggactaacagcagattagatactacagaagatcactgatcttgaaagtggagcaatacgtcctatctaaaattgagcacagatagaaaaagaatagaaaaaaaagagaacaaccagaaaataagtgacctgcagaacagtattaatgttctaacctatgtgtaattgaaactccaaaaaatatatatatttgcagatataataattggccaggtgtcatggctcatgcctgtaatcccaacactttgggaggttgaggtgggtggatcacttgaggtcaggagttcaagaccagcctggccaacatggtgaaactctgtctctactaaaaatataaaaaattatctgagcacggtggtgcatgtctgtaatcccagttactcaggaggctgagataggagaattgcttgaacccaggaggcctctgtgagctgagattgcaccactgcactccagcctgggtgacagagagagactccatctaaaaaaaaaaagagagagagagagaataatcaaattgtttacaaattggatgaaaatgataaacccacagatccagaagctcagtaaaccccaaacagaataaacattaaaacacacacacacaccaaggggaaaagacacattttgaagaggattaaagataagaatgacagcagactcttcaacaattgtgcaaaccagaagacagtggaatgacatctttaaagaagggaaagaaaataactgtcaaactagtaatctttagttagtgaaaatatatttcaaaagtaaaagtaaaaaaaaaagactttttcagacatacaaaagctgagagaactcctcaccagcagttctgaactttaagaaatgtaataggaagatattcaggcagaaggaaagggatatcagatggaaatctgaatctatacaaaggaagaatgtcagaaatggttaatatgtggatatctataatatccatttttcaatctcttcaaaagataactagctgcttaaatccacataatagttctacttctggccaagatggagtaacagaaaatggatttactctaaaatgctaaatggtacgactgctttggaaagttaagaggttggccgggcacggtggctcacgcctgtaatcccagcactttgggaggccaaggtgggcggatcacctgaggtcaggagttcgagactagcctgaccagcatggtgaaaccccatctctactaaaaacacaaaattagccaggtatggtggtacatgcctgtaatcccacctattcgggaggctgaggcaggagaattgctttaacccaggaggcagaggttgcagtgagccaagattgtgccattgcactacagcctgggcaacaagagcaaaaaactccatctcaaaaaaaaaaaaaaaaaaaaaaaaaaaggtcaaacacatgctcacaatatgacccagtgattctaatatctttttctaccagatataaaagcatatgtccacacaaagacttgtacatgaatgtccgtaagagctttatttataatagcctcaaattagaaacaacccaaatacccatcaacaagagaatggataaaccatttgtggtgcaaaatgggattctacacagcaataaaatgaacaaactactgatacatacaataacatgggtaaattcaaaagcattattcgtagtgaaagaggccagacacagaagactacaagctgcataatttatttatgtgaaattctagaaaaggcaaaactgtagtgacagaaaacaaaccagtggttggcatagcagttggagtggattgactaaaacagccacaagggaattttctggggcgatgagaatattctatactttggatgttgtggtggacccatgagtaacaacgttagtcaaaacccagtgaatcatagactgaaaatgggtgaattttgttgtatacaacttgtatttcaataaagtcattttttaaaaactgtgggatgtcaccaaagcagtgattgttgaaagatttgtacctttaaatgcccttattagaaaagaagaaagctttaaaaatcgaatatctaggtttctactttcggaagctagaaaaagaagagaaaattgaaaccaagtaagcaaaagaaagtaaataagagagaggctgggcatggtggctcatgcctgtaatcccagcactttgagagtctgaggtggatggatcacctgaggtcaagagtttgcctgaccaacatggtgaaacccagtctctactaaaaatgtaaaattagtcggacatggtggtgcatgcctgtaatcccaactactcaggaggctgaggcacgagaatcgctttgcatgagaattggaggttgcagtgagccattgcattccagcctggaaaacagagcaagactctatctcaaaaaaaaaaaaaaaaagaaaagaaaagaaactagataagagcagtagtaaatgaaatagaaaacagacaaaccatgaagaaatttaacaaagctcaaaatattcttcctttaaaagattgatataattaataaattttttaacaaatgaaaataagagaaagcataatttaccagtgagtgaaagaagggacaaatcctacaaaaatgcagaggacaataaaacaatattataaacaacattatgccaaaatacttatcaacttctgtgaaaagaacaagttctttggaaaacacaaattaccaaagcggactgaaggaaaaaaatagaaaatgaggatagctatataactatttaagtaattaaaatcctaattaaaaaaaaaatcttccagcaaagaaaatgctaggcccagatagcttcactggtaatggtattaaacacttaaaaaagaaataatacataaaacttacaaaaacctttttcagaaaatagagggtaagggaatactcccaattcattttatggtactctgtaccaaaaccctggaaaatgatattacagactaataccccttatgagcatagctttaaaaaaaaaactcttaagaaaattagcaaatcaaatccagcaatatataaaatgtatagcacatttcatgcatatgaatgtataaactcaaccaagtagagtttatctcaggaatgcaaggttggctcaacactgcaatttccaaggaatgtaattcagtatattaatgaattaaaggagaataagcacaagatctcaaaggattcaggaaaagcaaactaagaattgaaggataaattattcaagcaaataaagggcatatacaacaaagctatagttaatatcatacttaatggtgaaagactgaatgcttttctcctaagattgggaaaaatgcaaagatttctgcctttatcacttctacttaaaattaaactggagttctaaccacagcaataaaataaggaaaagaaattaaaagtatacttattgggagagaagtgaactctctttttcacatatgacatgattggttacattaaaaaaaactaatctactaaagaaaaagatctactagagctaaaacgttaatttaatgaaactgaaggacaaaggccaaaattaatttttatatataatcagcaaacaattagaaaataaaatagcaataaatcctattaacaatggcatccagaaatgtaaaatacttagtaataaatctagcaaaacatttgcaagacctctacattgataattacaaatgcaactgaaaaaaatctaaaaagacctaaataaatgaaacaacatatcatgttcatagattggaaggctctgtattttaagatgtaattcctcctcagattgatctgtagattcaacatccctatcacaatcccagcaggcattttgtagaaaataatgtgattctaaaatttatctgttggcttttaatgagtcttaactcagactaaaatgtaaagtctctatgtcagcatggtgtatgctctattggcccttcttcccctcccattttttgtatttaaatcaagttatggtttaaatgaggaacaatcaatatatctaattctttcctcttctctgcataaaataaacttgtgaactagagttcaggagcccttcactaggagggtggaaagcctcattaactgcaccaatgaggaagaagatgactgcatggactgataggaaacctcacagaagccgctgggcaagccctgggcagagctgcttttaaggcacattcttcccttgctggtgctgagaataaacagggaatggtgctgcatacggtttttttcaaaataaaaggaaatctatatgaagtacaaaggacttagaatagccaaaacaattttgaaaaagggaggaaattggaggactcatactacctggttttaagccttgctataaagctacaagacaatatgttattggtgtaaggatagacaaataaatcaatgcagtagaatagtgagtccagaaatagactcacacatgtcaattgattttttagaggcaccaaggcaatttaaggaaaaaatatctgcaacagtgctagaatgactgggtattcatatagaaaaaaataaaatttgaactccaaccttataccacaaataaaattagtttgagaagaatcacaggccttaacataaaagataaaactgttaatatggtttgtctgtgtcctcacccaaatctcatcttgaattgtagttcccataatcctcatgtactgtgggagggacccagtgggagaaaattgaatcatggaggcagttacctacatgctgttttcgtgataatgagtgaattctcacaagatctgatggtttataaggggttttccccacttcgctctgcacttctccttgctgctggcatgtgaagaagaacatgtttgcttccccttctgtcgtgattgtaagtttcctgaggcctccccagccctgcataactgtgagtcaattaaacctctttcctttataaattatccagtctcgggtatgtccttatagcagtgtgagaaccaactgatacaactataaagctaaaatcaaaaggactaacaagtgttgacaagaatgtggaccaaatggaactccatccactgctggtggagagtgaagtggtgcaaccactttggaaaactattaaacttttacctatcctatggctcagcaactgcacttccagatattgtcttagtccattcgagtggctctaacaaaataccataaactgggtagcttataaacagaaatttatttctcacaattctggaggcttgggagtcccagatcaaggcactggcagattgtatcactggcttcttggccacagacagcaccttgttgctgtcttctcacatgggtctctcttgggcctcttattaggggataggtatcatgagggcaccctaatgatctagtcatgccccaaaggctctacctcctaatactaggaggtactgctaacactaggccctaactcctaataccttaggaattaggatttcaacatgtgaatttggaggggatgcaaacatttaaaccacagctgtatttactcaagagaaaggaaaacaaatgtccgtaagaaatacctgcacaagaaaattcacagcaacatcatttacaaaagccacaaaccagaaacaatccaaatatctatcaacagaagaagagatagtatattagtacatattaatatacagagaaaatatatatagtaacatgtactaattatacatatatgtgtattatatgtatgtatgtatgtatgtactttttttttttttttagatggagtcttgctctgtcacccaggctggagtgcaatagcacaatctcagctcactgcaacctccacctcccagattcaaatgattcttccaactcagcctcccgagtagatgggactacaggcacccgccatcatgcccagctaatttttgtatttttgtagagacagggtttcaccacgttagccaggctggtcttgaactcctgacctcaggtgatctgcccgcctcggcctcccaaagtgctgggattacaggtgtgagccactgtgccccggcctgtactttattaattatatgtgtactgatacaatggaatactacttaggaattaaaagtatcaaactagtgataggtacaaacttgcatgaatgagtctcacagatactgtgttgaacaaaagaagaaagacacaaaatagtacttgctgtactgttccctttatatgaggttcaagagcaggcaagcctcatcaacagtaatagaaatcagagctgtgattgcctctggaaagagtgggattgacgggaaaaaagcacagggaatttttatactttgactggagagaggttcggttgcatgggtatttccattgtcagaactcatcaaattgtacacttaagatctgtgcatttcctttttttgttaattttacctttaaaaatgctacaaaagcacaagtttaaaaagaactgggctgggtgccatggctgacaactgtaatcccagcattttgggaggccaaggcgggcagatcgcttgagcccaggagttggagaccagaatgggcaacatgatgaaaccccatctctacaaaaaaatatgaaaattagccaggcatgatggtaacatgtgtctgtagttccagctactcaggaggctgaggtgggagaatcacctaagccagggaagcagaggctgcagtgagccaagattgcaccattgcactccagccccggtgacagagtgagaccctgtcagcaaaaaaaaaaaaaaaaaaaaaaaaaagcagaacacgacacaatgggaaacctaatgggttttgcctggtttgcctgccctataagatctggccctacctagacaggaccctatctggcagagctcactcctttactcaccttgctcttgccttgccagcttttcttttagttccacaagcacatcaagctcatacccctgggaacctttgcatttgtgttcccccgcgcccaccaccccctgccgccatttccagagttctttcccagatccttgcaggactgtgttcctaagagaggctccatggatcaggtttcctgcagaaaagggatggcaggcgaaacagggaaaatggaggtgagttcagaaagagaccatttccaaagccgaggccagagtgtagggagcccactagatagaatacagtgcctggtgctcatgcccctgggcctgaaaggggtaggggaggagaacgggaagccctttccagaaagtgttgatctgtccggatgagagccaggaaataaaacccagcttcactctccttcctccctcctgtccctgtcagtgctccccatgggcaaactgaatcagaactcagagggcaagggagccctcggctataggtcagcccctggacacggagtggagaaggatggagaagaaatttaggggatcaaacataatattcaatgcagacactgcccctggcttcccacctacacagcgattcggtcccgttcccttcttaatttcttcatggtacttaccgccacctgaactcatcttactttcttatttggtggcttgctgcttaccaaacgcccctcctctagaatataaaccccaggaatctggggactgtcctatctattaacgtatccctagtgcctagaacagtgccttgtacttaaaacagatgcacagtctgccataaatcctttgagaaaatgagcagatgggtacattactgcctcccaagcaggctgccagacacaagctagcacattctctccagactttttttttttttttttttttgtaattaacacactttttttttacagcagttttaagtttgtaaaaaaaaaaaaagatgggaaagtacaaatttccccaatcccctttctccctgcccccaccatttcccctgctatttataccttgtattagtatggaacacttgttatagttgatggaccgatattgacacactatgattcactaatggccatattttacattagggtttgctctatgttacgctggtttgacaaatgtagaatgacatgtgtccatcattgcgataacatacagaacagttccactcccctaaaaaaaactctgtgctccacctatccatctctgtgccctccccatgagccactggcaagcactgatcttttaactgtcttcattgttttgtcttgtccagaacggcatatagtgagaatcacacagtatctccatcattttgacccctgtggcactacagatcttccacaaacatttaccaaatacacaaatgaatggatgaaaggactcagagatgcccacattctgtagggtttggagcatcccatggagcagtgagcccaggccccttcccctatttggggtcgagaccttcattgcattccctcgtttgccctccccttccccagcctcactcgacgtcttcatcccttttaaattatacaaagatttccgtgtatgaaagctaatttagacaccataacagagactgtatttaatgtaaatggaagaagcggaggcagaaggatttatggaaataataaccggcctgtaataacacggagtgggtcacctgcttaagaaacagtggattaaggagaaggaaatttacctcccaaaagaacgaatgtcactggaaaactgccgcagtgccaagtcttggatgatcttattaaatcccatagatcttattatgtttcctaccaggagagactacttctttccctggttcataagaagggccaaagtgaggtctaaagtagaaaaggggaaggggagggcaaggggcaattcccagaaaggcctggagtcagcgcctaccgggtcgagggccctgtgtgcacatagcccagcactggccacacgctctgggcatggcatagagccctgagggtgggcaggggattcctgatgcaggaggatggggagtagataaggatccaggaagcaggaagctgcccatgcatgacagatggctctgacatcacagatcccaccctgtgcaggcgtgggtaacagggaggtccctagccatgtttcagacagctggggtgcaacagatgccatgcccgagatggtggttggaagtagcaggaggctttggatacatgggcaagctcctcatttagggaaacctgggttcaaatcccagccccactcctcactgtctgtgtgatcttgagtaaatcgtaaaattggcgtcacctattcccagcactgagtcaattctcactctgtccattcttcttgggaaattagccccaggaccaggatggccctgcccaggaggaaagaagcctcctggctgctagccagattcagacctggatgccttccggtaagagtaggagccgtataaccaccccccaaccttatcaagaacccttgttcccaggagaaacatcagctcccccaggccttgctgtcatccccagcatggagcccagtggggacacacaaccctgctggctgtgagtttaacctctgcagctggtgccccatcctgagcctctccctgctcctgccctccccacctcctttctgcataaaggtttgttaggaagtggctaagctagagagggccattggggaccacagacagagatcgcacgctacaggattatggctgttccatagtgcactgcagctatttgaatacatttgcatgaactcacaagtctcaatgcacttattgtgggatgtcctcatattggttggggggaggtggggggaaatggaggggagggagaccttgccagggaatgaaggcaaagccacctgggccaggaagagggggtggcttccaaaaatcccaagaagccattctggaacttcttagaggactgtctccatctgggacctcaaaccaaggtggacaggacacaggctcatctccctgcagggaacctgttcctgagttcctctcgcaggagtcctgaatgaggagggcttgggcgctgagaaacaggaagcatcatttgcctggtgcaagtcaaagatgggccacccacagggcttgcatagggaaccatggctcacctcctccaaagctgtgctccaatcccacctccacagcgagtcattccctgaccacattattaattctgcaaccgactccccatcctgacccttccccatcatcctattccttttactctctgctctacttttttttttcaatatcactgtggacttctaacgtaccacatggcttcctaagttattatgatcattgttaggttgagctccacactagaatgtaagccccatgagggcagcaatggttgtccgttgggttcgctgatacatcccaaatgactagatctgtttctggaacacagcagatgctctataagtacttcttgagtgaaagcatagatcaaccccttaagaaaagaagtagccaggcgccgtggctcatgcctgtaatcccagcactctaggaggccaaggcaggaggatctcttgagcctaggagtttgagaccagctgggcaacaaagtgagactccatctccacaaaaaataaacaaaatttgccaggcatggtggtgctcatctgtagtccaagctactcagggcctgagatgggaggatcgattgagcctgggaggttgaggctgcagtgagccatgattgcaccactgcactccagcctgagtgacagagccagaccctgtatcagaaaacaaaaaagaaagacagaaagaaagaaagaaggaaagaaaggaaggaaggaaggaaggaaggaaggaaggaaggaaggaaggagaaaaggaagaaaggaaggaaagaagtgggctgttgtcccacctcatttattcccattccgcatgctgttccccggcctccctgggaatctctgtccaggtgtacagtaacccaaacctaagccatatccccagcctaaacagcacgaggaaaaccttctgaaagttgatgggaacacttaagacaaacccagcattttgctcagagggcagctgtggggctgccccacactcagaggcccactcagggcccctgcacttctgggataaaatgggcaaagggatggccctgctgggagcaaagcagcccggccacatctccctggctgcgctcagctgacaaggtcctcagcttcccctcctgcggggttcttcatcatcccagaaatgtttgcatttgcaggttgcaattaacattagccttggaagatctctgttttgtgggagcctcttaatgaagccattgttcttggcacctgctccacccccacctcatcccagcacccacacacactcacactgcgttctatttgggctctcgggaaatgatggaccgggagctactcagggattgaggtggcctccagggtctgggcagcttcttgagacccaaaaggtcttctaccctataatatgggccccatcacccagggggtgctacagagactatgggtctgagaacaaaggagaaattaggaatcagaaagagaaaatccactttccctcccccaggcaaggcccctgcctgggaaagccaggcagaagcaggggcgttgagggagatggagggctggccgggagtccgcacatgcagacgaggcgggagtgcctgagactgagaaatacagcagcctctcagagcagcaggcgttccaacagaatgacttcttttaatctaaatttgatgagaccagggtgcctttcacctaagagagagggaagggagtgtactccttgctccctggccttgagtcctccctccccccgccaccccacctcccctgcagaacctgtcttgccttctcaggccacttcctcctctttcatgccaccaggaatgccccggctgcggcacacacattcctcggtgaccagggtgtaattcttattgacctgatgtttttcttatcactgcccggccagagctccctgagttccccaagggagtgatcaaaaggactggtttgcccaagactgagtggattcccggaatgcgggtctttctgtgctgaaaccaggaaaatcctcgaaagccagggtggtggatcaccctattccaaagaaggtttcaaggggctcatgggagacccttccccgaacagctggacgccatcctgaaggccggaacacctattgtgacatgaggtctccacctgcccagggaggaagctgggtcttatgacttgtcactatacccctgtctgctccacttcaatgctagcagcactttcaaacaattaagcagacataaatcctgaaggctgggaggccgaggcgggtggatcacaaggtcaggagttcgacaccagcctggccaatatggtgaaaccctgtctctaataaaaatacaaaaaaaaaaaaaattggccgggtgtggtggcatgcacctgtagtcccagctactcaggaggctgaagcaggagaattgcttgaacccaggaggcggaggttgcagtgagctgagatggtgccactgcactccagcctgggtgacagaaggagactccatctcaaaaaaaaaaaaaaaaaaaaaacaaaaaaactcctgaagccaaggcatcctgacttttcttcttggtccctgcccctcaacatccatgcccagcccatcccatgcactccctatctctcatctgtgcccacctctgtccaccctgcagtgccactatcttgatcacctgggctgggtgaaacagggctaactgattgggacagcccagcccagcccagttgccaatgtaccaggaatacactcagtgttatgggttgaattatgtccccaaaaaagatacgttgggctcctaaaccccagtacctatgaatgtgaccttatttggaaatagggtctctgcagacacaatcaagtgaagatggggtggttaggttgggccctaatctaatatgaccagtgtccttagccaaagaggaaaatgtggacacaaagagaagacagccgtatgacaatggaggcagagattggaacgatacgttatacatgcatccttacggagccagggaatgccgcagataacaagaaaagaccagaagctaggaaagggcaacggagcaccctgcactgtaggtttcggaggaagcataaccctgccgacacctgaatttcagactctagcccgcagagctgtgagaccaggcatttctgtgcttgaggccacccagttgcagatcttgattccagcagcaacgagaaactcatgcaccaggccaacatagcggatcagaccgagaaaccacaagaaaagtggaaaccaaaagagggagtgggagcgaagtggatcaccctggctccggggctgcctagggtccccgctggagctggggaaaatgatggagctccagccatcaagccacatggccaggactttagccgttcccatgctcaaccaggccagagtgctgccttgctccatctgtagccctgccttgtgcaacgtcaaagtggccaggccatgggccacctcctgaccccactgagcccagctccagggactcaagtcagtgccaagtcttctctgcctcctcccactcccactccaaatggaagagacaggtaaggtcaggctgcaggcatttcattccctgctgagtccccgggagaataccaaccaggactcagaactagcctggcacctggaaaccatagccccactttatttctgtgttcctcctggagaccccctgaaataagtgtctgagcctgccaggttctccccaaggcagagcctgagatgaggacatttgtagtaggggtgtcctatctgggaggccaccccagggagcagtaatgaaagaacaagagggtgacatagggacagaagaaagccagcacaggagtgctgttgagaccactactgtgagcagcaggaactccttcctccgggacctctgaagaatgaatggcacagaatgctgcccagaactgtgccctgtaggactaggggcgggggcaataacccactgcccccacattgcctggctgcagatgctcatagaccagacaagcaccttagaagctcccaccagcatcctccaggttggaggagccgggggcagagatgggaaatgtatgcccttgcttggggcaagatggcatcagtgtggtcacagtgggagcctgcagggcaccgtctcctggctggcctggatcagaggtggggcggagcagatgcaggtcaggcagcagactgcctgctcagtagataaatctttctgcagacctttgaggaatgactcatcacttatacccaggtggggaatttgtcttccccttgcaggtctaggttaagaaaaacagagagagggtggcacatgattgagagcttttgatgttaagtttccctgtgttaccagcccaagaaaccctccggtgacgggcaggcctgctcggggacagagcacagtgtaatcagggatcgtgtctgcttcagaagtggcctggagcagagatcccagcagccagggtggctggcaggagagaagcaagccagacatccctgctcccctctgcctgcctgtctttctaagtccaaaagccagcacaggctatccccaccctgaaaataggctgggatccaaaaagtgttttgaaacatctgctgtttggaactggaaagcaccttctcattgaaataagactgtgcacagctcctcaggccccagcccaactcacaggaaacccactgagcgtggcccaccaaaacaccatgcaatcaacggggtgagcacgtcatagagtccccttggaaagcacaatcacggtcacaactcagggagctagaagcacagagttccctaggcagcaaggtcaggggatcctcctcttcccatcctctcaactactgggcagtggcatggggcagtttccaagctccaaacttctgatggcaatcttatagccagagcgaggactccagcaaacaggaccgggatgaagctggaggaacttgaggggcttctgaagctcagattcatctccaggagctgaggaggcacaggggaaagcccaggagaaggtggcactgtaccctctttctggccgtatcttaggatgaagagggtagcctctgcccaaggattagatggaagtcactacaagtcaccagcgcctgtggctaaggctgactcccagcctcctggattctcccctgctgctcagaccacagctcctggaagctcctccctcaatgtctatgggctccactgggactcaatccccaatccccagctcacttctctgaggacccaacacagcctccatcttctggacaggccagctgaggcccagcatcacccgggaagcaagtgccagaatctagaccaggacacagaaccgctcacccccagccggcccacctactcaccaggaaggtgcaaggaaagctcctgtttctcgggtaatgaaggccgctcagcctctgcttggggatgggagcctggagcgtatcttttgggaaattacaggtatcactttatctttccaggggaaaaaataaccatggaaaacgcctgcaattacagctcatcaccactgactgtgtaactgcagcctaagtgcctggtaatcagaagaccgcagacaatgagaatttggctttatttagcacctttctactcctccacctccaaccctttagcatgatgtgacagcaggagcctggttttgcaaacactcgatacagcctttccacagtctttccatacaaagatcgggccactgacccttggctgtccacggaaatgtcaacttcttttctttccccagaggtctggctgagtgttactgggccacctggcccctctcagtcccttgctctcgtccgaatttagtcttttattcaaccacatttgtggagtgtcacctctgtagcagccatggagagaggagcaagtaacacagcagtgaacaagccaggcaaggccctgccctcctggggattacattccagtctgggaaacaaagagtacacagggaaacctgtaaatacaagaaccacagcacatcaccagaactatgaaaaaatcttaaaggggccgggtgcagtggctcacgcctgtaatcccagcactttgggagaccaaggcgggtggatcacctgaggtcaggagttcaagaccagcctggccaacatggtgaaaccccatctctacaaaaatacaaaaattagctgggcatgatggcgggtgcctgtagtcccagctactcaggaggcataggcgggagactcacttgaacccgggagatggaggttgcggtgagccgagattgtgacattgcactccagcctgggtgacagagcaagattctgtctcaaaaaaaagaaaaagagaaaaaaggaaaagaaaaaacttacaggtgatggggtggatagcaacacacagggacacattagggtggtcagtgaaggcgtctctgaagaggtgacatgcccactaaaacatgagggtgaggacaagtggttcgttacagtcaaaggtgagaaggcagcagatgcaaaggccatggggcaaaaacatcttactgggcctttagagctgtgtaaaagctaatgagtgcccagaacacagtgagaacagaggagaattgcataagctgagcttgaaaaggcagcagaagagatgccacatgacacaaaggagtttggatttgaagccgattggtaggttttaaccaaagggacgaaatcatatgatttgtatttggaaaatatcaattcggttgccaggtaaagaatggatgggcaggccaggcatggtggctcacgcctgtaatcccagcactttgggaggccaagacgggtggatcacttgaagtcaggagttcaagaccagcctggccaacatggtgaaaccctgtctctactaaaaaacacaaaaattagctgggtgtggtggtgcatgcttgtaatcccaactacttgggaggctgaggtgggaggatcacttgaacccgggaggtggaggttgcagtgagccgagatcgtgccactgcactccagcctgggcaacagagcgagactctgtctcaaaaaaaaaaagaatggatgggcaacagacaacatggagaacatgcgggctgggcgaccagcagaggctgctgcagggacctgggaggtgacaggaaatagcaagaaggatatttacctatttgcgtttgggagaagaggccacaagctggattagtgttaatggaggtgtgacgatgtggagaggatggagcagatgctcccggagtctgtccgagcagctgggtggacgggaaggccatctgccaaggaggacaaggttgctaaaggcatgtacaggacagaagtgctggtccacagcctgtttgctgccaaatccatcccttatgctgcccttgcccttctccgtgtctcagaggggtgctgacctcagcatttcccaggctcctgtgtcagctgggttcagccagtgggagacactggtaggggattgaagggcaagagtagcggagttgggacatctccctccctctctgcttcaagcagagtccaggaagcaggtgttatctcctctgaggctccagctcccaggaggcagctcccctggctgtggttcccgctgggtctccccagcccctggggtcaaggacccatctctgttccttgttcctccaaccacaagtagttaaacttcctgcctttgctaacctctgggtttctgcatcattccttgtttggtttctcagtttttccattacctgtgtaaccaaattccgtctgctttaaaaatttagagtggtgtatgtaattctgattggaccttgactggtacatgaaatgcctggatgaggtgggaggtgcaaagctggtccatgtggaccttaaaattttaatcttatattgatcctgcctcctagaattccaagtaccagcctccaacaagcagagttaaccacaactccctttggaacataaaaccacaaggtccagaggctgaaaaaaaccttaaagatgccctagccctaactgttacccaatgctggatgccctttgtaatgccttaccagattatcttaagcctgggctaatcaccttcagtgacggtgtattagttagctgttgcaattataatgctgtgtaacaaaccatcccaaaactcagtggcttaaagtaacaagtagtttattttcttgctcataggtctgcgtgtggctcagatgtttctccttcaagctgagggcttggtagagcttggttccaattgggttcaagtctgctctatgtgtctacacattctctggagaccagaatccacctaagcactcttctgacagaccacaagctctcaggaggatgagccaaaccacacgacatcggaggcctctgttcgcatcacatctaacagaattccactgcaagtcacacagccaagagcaatgccaatggggtagggagatataccccacaagatcacgtgacaaaaggaatgcatgaagactcaggaatgataatgcaaccagtaaaaggtttcctctgtcctgattttgagctggaatctgcctgtctgtgtgtgatggttaatataggttggcgcatcattaaaagtgatagcaacgaccccaattcctttcgcaccaatgtatattaggtgtcaacttgattggattgaaggacacctagataactggtaaagtattatttctgggtgtgtctgtacgggtgttgccagagaagattgacatttgagtcagtggactgggagaggaagacccatcctcagtgtgggtgggcaccgtccaattcagctgccagcgcagctaggtcacagcaggcagaaggaggtgggatcagcttgcttgctgaatcttccggctttcatctttctccggtgctggatgcttccttctgctccttctgcccttggaccccagaatccaacttcttccgcctttggactctgggacttacaccagtggcttgccagggactctcaggccttcggccacagactgaaggctgcactgtcggcttccctgcttttgtgcttttgaggcttttggactcggactgagccaataccagcttctttcttccccagcttgcagacagcctatcgtgggacttcaccttgtgatcatgcaagccaattcaccctagtaaactccctttcatatagacatagatcccattagttctgtacctctgggaaccctctaatacatgatgttaagccaagttttctgtatccctgttcttccacgtgatatactagacaacctcctgcgggtccgaagcccacttttaatcttctgcctcatgaacctccccgatttctttaaagtcctgattttcagacctgtcatcctgtttgctcccctctgaatatgatcccattttattttgattacacctcatgcataatgtccacaaccaactgcacttggtattttctaaccatgacagattccttgtccctgtggcaaggaatcactagtggaagctgagtccatataagcaagagaaggcagcttcccccaaagcactgcctccagaaggttctcttggttatgccacccacacagatgatctctcctcttacgctgaaccccacagttctcatgcatcgctaggcctgtgcttgttgacaagctgcttccggtccttagccttgggtccatggacggacatcatagctctatttgggcctcgagaacttagaagacagggtcttctttgggaccacagtacctggtaccagggtctgggagcccctaagtctatgtttgatgattggtcaagtggtcatgattgaggggctcaagtagctttgcccatagacactcaactattctttaaggggtcaagtctgagctcttcctaaagcagcctccaccagaatacaaagctgggtgtgagatctcagcactagccctagtaaatatctcaacccctctagactgtagagatgtttacaggagctgtctgcactgatttaggctggtcaactggagggagtcacacacacacacacacacacacacacacagctaagaactcaacaggattttgaaggcctaagcaaagctgacaactgatctacagcctccttccttcagctggaaggaatctcatatccagggagggaagaggcagctgtagctgagaaatagaatagggaatgcctcatcaggagaaggatggaatagcaggcactagaattaaagggggacttttccccataatgttagtggaacccttggccagacagcttctccagtgtattagtcaggatagaataggataagctgcagtaacaaatatccccaataccctagtcctttagcatagataagagtttgtctcttagactacatgggcatcacagatcagcaaggggctcagcttatcatgatctctcaggaagccaagctggcaagggcattatttcaacatttgctccccctgcccccagtgctccccctgcccacagcagtgggaaggatgtgtcacagaccaggcacccgttctgaaagttgctgcccagaagtgaaacatgtgtgttcatattttcttgattagagtgagtagcatagtgattgccaactttaaaagaggtaggcaagtgcaatccttcacatgcacagagggcaaagagcacaaaagaccaccatgcctaatgtcaaggtgggagcctcagcccaggggcaggacctccacagggcagaggtgcccagggcccagctcctccctggtgggcctcttgtttgctctctcttgctcactccttctccctccccctcttgctgtctttttccacgtattcattcatttaacaaatattgattgcgccttcatacagcagaatgtggggcagcccagtggacacagcagattcagccctgatcttgtgagctcttgtccatcaggggacaccagcaaccaagcaaatcccacgtccaccgcttctcaagccaaaccccacgtcttccttgatccctctcttcctcactgcccacatctaattcatgagtaagtcccatcaactccactccaaaatcatgctgaatctgacacccccctccaccacagatgacccctgtcccatcacctctctcctgtaccccagtagaggcccctggatggtctccccatcccactcttcccacctggagtctgttctccacacagcagtgaaagcaatcttaaaaaagccaatgggtcgggcgcggtggctcacgcctgtaatcccagcactttgggaggctgaggcgggtggatcacgaggtcaggagatggagaccatcctggttaacatggtgaaactccgtctctaccaaaaacaaaaaattagccgggcgtgatggtgggcgcctgtggtcccagctactcaggaggctgaggcaggagaatggcgtgaacccgggaggcagagcttgcagtgagccaagattgcacctctgcactccagcctgggcaacagagcaagactctgtctcaaaaaaaaaaaaaaaaaaaaaaaaatcaatgccaccaggtgcagtggctcatgcctgtaatcccaacactgtaagaggctgaggcaggataatcacttgagcccaggagttcgagaccagcctgggcaacatggcaaaatctcgtatctacaaaaacaaaaaatgcaaaaatcagcctggcatatagtggtgcgtcccagctatttgggggactgaggcaggtggatcacttgagcctggggggatcaaggctgcagtgagacaagatggcaagccgatatgagtggaaggcaaatataaaataggtgaacaaacataaactaaacacaaattgtgttaggcattatgtggacgacaagtgaggaggtgctgagctagtgaaactcacagggacagcctggaggcaggcagtcagggaaggtgtttccagcacctgccatgccaccctggcctcacctcctaccccatcatctgctgcagctcccagtcctgcacagaccagcctcccataggtgccatagggcagtgcctggcctcagcctacacggtgactctgaggccctctgtcacggtggaaggaaacatctgagggctctcgctcttgtgcaatcctggagagtgggcgacttcacgtccttggaggcaccccgaccaatggaccgacggggacaggagcccatgcacagaggcttttccctttcatcctggggggcaggcctgaggtgcacattatacaaccccatggggcaaagcgccagtgcctgtggctgcagctgcctccaatattgctttttcctccttccctgcttcactcccttcttccttgctcccacttccaagaatcatattcccaaataaacaacatgccagtaagccctcatctcaggggaatcaaggctgaggcagaggcctccttgagcaagtgacggctggactgagctgcacaggccgagaggagaggaaggaagaccaccccaggcagcgaggatgagtgggagcagatatccaaggggtcccaggggctcatgtgtctggggaataaagaaggggcagccggagtggcctgagggtagggagggagaaggcatcagccctcgaaggaccttctgaacaaggccagagagctgggacttcctccaagggcagccggaagccatcaaagggttgaatcaagggaattcacacagctcaatatgcctttgaaaacggcggctgcttgtgttcgttccatctagtctctgcgtgtcttacatcctcccctttttctttcataacctggctcttctccgcctttcattctctctgactcccgtgcctacctgaccctctcccgctccttgcacccgctaacctctggggctgcttcctggacctctctagccctcaagtcccgttaaagacaccatgaagagtgaggcaataaggcgaggcagcatcgtagtggggaccgtattttctgagcccatccaggactgaggtctgagaaatcttgttgcacccgcgggagggttggggcaatgtttgaaattggagctgtcgtgagagttctgagaagtacggttgccgtgactgcatggtgaatccaaattgcaggagtcagacaaagtagaaatcgctgtccccaggatatgggggaagaattcagggatgggcagtgggaggcattgagctttgtagcccacacacctggcttctctccaacaaccaccaccactcgctgaatggccacgggcaagttacttaacttctccaaaactcaactccaatgtttagaaaaatggggcaataatacagaattcattaggactctcggtcacaagtaatgggaaacacacacaaactaccttaaaatgaggaggggaacttgctctcatagagcaccaggagtcttccagagacaacaagacaggcgcacgtttctcctcctctctttgtctctccagccagcaccttctacttcccagccagggtagagaaagccagaaaactaaaagaaagcctgggttacagcccgggcaacacagtgagacctcatgtctacaaaaaataaaaataaaaaaatcagccaagcgtggtggtgcgcacctgtagtcccagctacttgggaggctgagaggggtggaatgcttgaaccttggagtttcaggctgtagtgagccgtgattgcaccaatgcactccagagggagaccctatttaaaaaacaaaaaaaaaaaagcctgggtttatatgttaagatttggcttcctggccaggcacagtggctcacacttataatcccagcactttgggaggccgaggcaggcagatcacctgaggtcaggagttcgagaccagcctggccaacatggcaagaccctgtctctaccaaaaatacaaaaaattagccaggcatggtggcacatgcctgtagtcccagctactcaggaagctgaggcacaagaattgcttgaacctgggaggcggaggttgcagtgagccaggacggcgccactgtactccagcctaggcaacagagcaagactgtctcaaaaacaaacaagccaagcacggtggctcatgcctgtaatcccagcactttgggaggccgagtcaggtggatcacctgacgtctagcatttgagaccagcctggccaacatggtgaaaccccatctctactaaaaatacaaaaattggccatgtgtggtggtacgcaccatggaatgtgcctgtagtctcagctcctcgggaggctgagacaggagaatcacttgaacctgggaggcagaggttgcagtgagctgacaccatgccattgcactccacaggcaacaaaagtgaaactctgtctcaaataaacaaaacaaagcaaaacaaaacaacaacaacaacaaaaaagacaaaaacaaaaaaagatttggctttttttttttacagacatcagtctctgtgtgtgtgtgtgtgcgtgtgtgtttgtatgtacgtgtgtctgtctactgtcccaattccaaatttctagtagtagctggcccagtggatcaagtgacacgtgtgggccaatcagccgtgctaaggcaccataatctagagagagaagtctgagtgacttagattagcctggaccaagcacctgcagtcatggtgaggctgtgatgtgccaattcaagtgtcagaaccccaccctggaacatgtgtgtgtgagagtgcgtgtgtgtgagtgtgagtgagggtgagtgcatgtgtgagtgcatttgtgtgtgagtgtgtatgtgagtgtgtgtatgagtgtgtgtgtgagtgcgtgtgtttgtgtgtgaatgtgtgtgtgagtgtgtgtgtgcgcgtgcgcacgtgttgggtgaaggagagacatccttcccagaaaagcaagggaggctgtagctgggcagttgacaaacagggaacaccacaaaaacctagtccctgaaacgggatcatgttggtgaagtgctcacagcaacagctgcaataaatggttcccgcgactgtaagctgacccctgcagtgctatttatctcctcctccagcaaaacttccttagagctgcccagggccacagtcttcacttccttatctctcgttccctgcttactgctccacgtggagtaaaaccacatctctgtggtcacactcatccaagttcccaagttcccatcctcctaatgatcaccaaagtcagaggtaagttttctgttcctcttctgtgttatttctcaacagtgttcaggatgattgcccactctgtccttcctgaagtgcgtccttctcttggtcattgggctcctgcctcctcccagttttcctccgcctccactggcctatgtttctgcgtgctggcgtgccccgacactcagcccttggcccacctgcttctctagccagtaactctccaagggcctcatccacttccgtaactttgtcatctacggccaatgaccttcacatctccattccagccctaacttctccccagatctccaaatgcctctatccaactgcctgcatatcatgctatcttcacatgggtgttgtaaactcagcagagtgaattgaaccccctctaccctgacttccccatgccattgaaatagcattcagtgacataggagttgtcccagactcctctctttccctaacccgctacccccaatccatcagcaagtcctgcaggctctgctcatcagtcataggctgaattcatccacttctctccagccatctccactactatcaggcagccatcacttcttgcctgcactaccccaataatctcctaactggtttcctccctttctctgctgtcccccacaatccattctccgtttaaacgccaaagcgatgatttcaaatgtataagccagattatgtcatgtccttacttaaatgcctttctttaacactcagaacagcacgctaactccttaccttaaccgacaaagccctagaggatctgccactgcccatcccccaggtgctactgcacgccatccccccacaacacacacacactctgctccaggcacgctggacagcttctgtttctccaataattcaagcttattcctgcctttgcaaccacccactctgcctagacagcttttccccctccacaccttccaccaaaccctaaagtcccatcttcatgtgaccagctcctctgatctcccagctcttgactgaaaagtcacccctccagtgggccttccctaattgctctatctaaagaaactgctcagggctgggcctggcggctcacgcctataatcccaacactttggaaggccaaggcaggaggattgcttgagcccaggagtttaaaaccagctagccaacacaatgagaccccatcacttaaaaaaaaaaaaaaaaggtttttgtttcaataatctggatgtggtggcaaacgcctgtgtacctccagcaatttgggagaagtgagaggattgcttgagtcctggaggttgaggttgcagtgagcggtaacttcaccactccactccagcctgggcgacagagcaagaccctgtcttaacaaaaagaaaagaaaaggaagctgcttagtggatctgtatccgtcacctattgatttctctgcatagaaatcagtacttttcagtcaggcgtggtggctcatgcctgtaatcccagcactttgggaggccgaggcaggcagatcacgaggtcaggagatcgagaccatcctggctaacatggtgaaaccccgtctctactgaaaatacaaaaattagctgggtgtggtggtgcgtgcctgtaatcccagctactcaggaggctgtggcaggagaatcatttgaacccaggaggcggaggttgcagtgagccaagatcacgccactgcagtccagcctgggcaacaaaaggagacactgtctcaaaaaaaaaaaaaaagaaaagaaaagaaagaaagaaatcggtatttttcaaatttatttattggtttatgcatctgtccttttctaatgtatttatttctttatggtctatcattcaccaaaatataatctccgtgagagtaaggacctcatttattcttctgtcccctatgtccaaaacagtgcctttcacatagttagcacttaacaaaatagaagaaaataataaatatatagtaaaggggcaaaaggggtaataaaccaaacattatttaaaaaaaaaaaaaggtcacttgtggatgaagaagtgcaacaaatatctggaaagggaaaaatgatggaagtgtgcagatggaggaagctgccactggaatatgctcccgggaggctgggttgagtcagccactgaatttgcataaagaacgctagagagattggggcttgcagttgtcaaatacaacctgtggtgggagggaaaagggggaggtggtgccaaaaacacaggggttaattgaaactctgtggaacaaatttgtcattcaccaccctccaaccccactcccacctaacagagcaataggcaacacagcgaaaaccagaaagcactcctggctaaatcaatgaaactgctagtagagaatgggaggccggcgcggtggctcacgcctataatcccagccctttgagaggccaagacgggaggatcacttgagctcaggagtccaagaccagcctcagtaacaaagggagaccccctctataccaaaatttttttttaaattagctgagcatggtgatgtgtgcctgtagtaccagctactcaggaggctgaggctggaggatgacttgagcgcaagagttcaagcctgcaatgagctgtgattgttctactgcactccagcctgggcagcagagcgaaaccctgtctcaaaaaaagagagaaagagagaacagagcggctgttgtggctgctggtgttccatagtaaagttcatctcgttctgccatttttgcctccccacaacctagcttcacagccacgtccctggccagtcctcataaagcaaagccagatagtaaagcaagccctgcacatgaacccagaggtccgaggcagcatctccatataggggaggtactcaatgggaaaataaaaccacatataaaaatcaggaaacccacgccaacctcctagaataattacccccgtccttcattcttaaatagaaacagaaaaatgagattcactagacatgtgacaaatgaaagagaaactctaagattaaaaaagaaaatgaacagcaatccaaatgtatcatcaaagaaatgtggaagccgattacgtccaaaaaagagaacagattgcaatgaaaaaaggaattatcagagaacaagaaaaagttcttagaatttaaatcatatggttgttaccataaaggccacatatggcaagcccacagctaacatcgtacacaattgcagaaagttgaaagctctttcctctaagatctggaataagacaaggatgcccagtttcaccacttctattcaacagagtactaggagccctaaccagagcaattaggcaagaaaaagaaataaaatgcatcgaaatagaaagaaagaagtaaaattgtctctgcttgctgatggcatggtcttataaatagaaaatcctaaagactccatcaaaaaactgtcagaactgataaaggaagtcagtaaggttgcaggatacaaaatcgacttacaaaaatcaatagcatttctatacactgctaacaaactatctgcaaaagaaattaagaaaacaaccccatttttaatagcatcaaaaaaaacacaggagttaattgaaccatgctgaaaacaataaaacattagtgaaagaaattgaagataacacaaataaatggaaagatatcccatgttcatgggttgaattaatattgttaaaatgtctatactacccaaaggtatctcagattcaatgcaatccccatcaaagtttcaatgtcatttttcacagaaataaaaaaaaatcctaaaaatgtgttcagaaaaacaaagggggtaaatattatgttaagtgttcatactcccccgccccacacacacaaaaacaaataaataaagtcagtaagaggaaatttagagaagtgatggatatatctatgaccttgatagtaggaatagtttcactggtatatacttatccccaaaccaatccagttgtatacattaaatatgtacagcttttgtatgtcaatcataccccaataaagtggtttttaaaaaagaaacaatatagttgctgaaatataaatacattagaagggttagaacgtaaagttgagagaatttccaaaatgttataagaaagagaaaacctgcatatgcagaaagaaagaaaagataagagacatagcacatcaatccaggaggtccaacgtctgactaatagaccctatagaaagcgagcagagaaaaaaacatacataagtaaactactaaataaaagcagaagaaggttttccattatttaaggcagaaagaatctttcggaatataatattgggaaacattagttcatcaaacaaaaagaccctgaaagtctccagagagaggaaagaagttacttacaaaggaattagacaccacctgtggtttctcatcagcagtactggatccagaagtaaaatgaggccctcaacattcccaggaaaaatttgttttgaaattagaaaactatgcccacccaaacaaacaatgaaggaaaaaaaaagtctcagacatccaaaaatgcagaaaaactacctcctctgcatcacttccaaagaaattaccagaaaaagtactctaacaatataaacaagataccaagaaaaagagaaagttggattcaagaaaaagcagaactctcactaaaaaggaaatcccaggataatggctggttggaaccaaatgtcagtgtactctaaagacaagttcttcaaaaagagcacagtaaattccgaacgaggcaggcgcagtggctcatgcctgtactcccagcactttgggaggctgaggcaggcagattactcgaggccaggagttcgagaccagcctagccaacatggtgaaaccccatctctactaaaaatacaaaaattagccaggcatggtggcgcatgcctgtaatcccacctatttaggaagctgaggcacgagaattgcttgaacctgggaagtggaggttgcaagatagctgaggtcgcaccactgcactccagagactccgtctcaaaataaagaaaaagtaaataaacaaataaattctaaatgataggtagacttaataagaaattggaagatgtttgtgaaatgatgagtaagataattttgcttccaccaaaaagaagaaaaatatacacttaaggccgggtgcagtggctcacgcctgtaattccagcactttgggaggctgtggcaggtggatcacctgaggtcaggaattcaagaccagcctggccaacatggtgaaaccccgtctctactaaaaatacaaaaaattactcagcgtggtgtcacgtgcctgtaatcccagctactcgggaggctgaggcagaagactcgcttaaacctgggaggcagaggttgcgtgagccgagaacatgccactgcactccagcctgggcaagagagtgagactctgtctaaaaaaaaaaagtatatatctatatacacacatatatatatatacacacacacacacacatgcacacacttaaaaatgccaagaaaaaaattgtaccaaacaatcatgatctgaatcatgaagcaaattaaaatgtggcatgattttgaacaagtgatggagaatacaaaaagatttgattttgtataagggttatgatatgagattggagaggaaaaaaacataatccctttataccatactactggttcactgcagaaaacaatgcttatatcatcacaaaatacaaaggctgttgactggatttcaacttttaaaatcattgtatagataaaacatgaatgacataaatgtggttaaaaaacaaactttcaatgtcgccaattttgacaatgtgaaagataaggatgcagaagttgggaagttagaaggggtggggagaagaggagaaaggagaataggaaatctaatcatgtcctcgtgttacagggtgggcacacagaattactggcttacattaagggaataagaattggactttttaggctgggcatggtggctcacatctgtaatcccagcaccttggaacacctgaggtcaggagttcaagaccagcctgaccaatatggtgaaaccccatctttactaaaaatacaaaaatttgccaggcgtggtggcaggtggctgtaatcccagctactcaggaggctgagacaggagaattgcttgaacctaagaggtggaggttgcggtgagctgagatcatatcaccgcactccatcctgggtgacagatggagactccatctcaaaaaaaaaaaaacagaattggaagaatcggactttttttgagaccaggtttcactctgttgcccaggctggagtacagtggtatgatcatggttcactgcgaccttgacctcctgagcacaaatgatcctcctgcctcaacctcctgagtagctgggactacaggcacatgccaccacacacctggctaatttttttgctttttgtagagatggggtctttctatgttgcccaggctggtctcaactcctgggctcaaatgatcctcccacctcatcccttcaaattgctgagattacagatgtgagccaccaacaaaattggatattttaagtgtattaattaaaattgataaggtaaccagtagaagaaataattaccaaaataggacgtagatgggggaagtaagcaaagtcttcatatctcacagtagggaaccaatatgggcctaaagttaacaaatcaagaaatggaagtttaacaatattagaggtcaccaaagaccacacacacacacacacaacacacacacacacacatacacgacagtggttgcctctgaaggacagaactacacgtatagactcgtggggagttctttatgatcagctgactgaaaaaggaaattaaatcagatctaatttacagatggttctgcatggtatattggcatcaaccagaagaagactactattaatacattaccactgtaatcgagagcatctcttaaaggcagtggttaagggaaatcctcccactagacagaagttccagcattatctttggttgtctacttgggctgaatggagagataaccaaaagtatggatctacactaacttatgggctgtggttaatggctggacaggatgctcagggacttggaaataacaagattggaagatgaagacaaggagctctgggaaggaggaatgtggatggacttcttggagtaggcacagaggacaaatatgtttgtgtgccgtctgaatattcaccaaagtctagccactgtagaggaggttttcaacaagatgacacattttgtggatatccatttacatttttccccaggcccctgatggttgtgcaataggagagtatacaaaacagtcacagtggcaatagcagagtctatgtgtgggcttagtgataagaactccactcacaaaatccacctggctaccacctctgctgcatgcccaaactgacaacagcagagaccaacactgagctggtctctagtaccattctgcagggggattagccagacatgtggtaacaggttgattatatggaaaggggcagcaatttgccctccctagaataatatgtattcaggatatagatgtaccttccctgctgacaaagtttctgctagtactactatccatgacctcatagggtgccttatcctgtgaggataaggttatccaccatcatgatattccacagatgtggtttggctgtgtccccacccgaatctcatcttgaattcccatgtgttgtgggagagacctggtgggaggtaattggatcatgggggcggtctttcccatgctgttctcgtgatagtgaataagtctcacgagatctgatggttgtaaaaaggggagtttccccacacaagctctcttctcttgtctgccgccatgtgagacatgcctttcaccttccaccatgattgtgaggcatccccagccacacagaactgtaagtccattaagcctttttttcttccaagtctcaggtatgtctttatcagcaatgtgaaaacggactaatacacccacatgacaatgtttctgatcaagaaactcactttgtagaagtaaagtggggctgggtgaggaggctcatgcctgcaatcccagcactttgggagaccaaggcgggaagatctcttgagcccaggagtttgagaccagcctgggcaacatagtgagaccccacctctacaaaaaaaaaatacaaacaaaaattagccaggtttggtggcatgcacctgtagtcccagctacttgggaggctgaagtaggagggttgcttgagcccagagaggtcaaggttgccgtgagccatgatcgtgccactgcatcccagcctgggcaacagagcaagggccctatctcaaaaaaataaaaataaaaaagtaaagcaatggctcatgcccctggaaatcaatggtcttcccacataccccatcacacaaaagcagctggtctgacagaacaagcaaatgacctactgaaaactcagtctgccaactggacaataacattccaaaagattggtctgttttacaggatgcagcatatgctgtgaattgatgtccaatctacagccatgtttttcccagaccagaatacacaggccagggaaacaaggagtggaagtggaagtgactcctcttactatttttaaaaaatactttctgtagagaaggaatctcactatgttgcccaggctggtctcaaactcctggcctcaagcaatcctcccgtctcggcctctcaaagtgctgggattacaggcctaagccaccacactcagccacctctcactatcatacctaacaactctcacagaatgtttgtttcctatcccctctttaactttgaactctgctggtttggaggttttaggaaccaaaggaggaatgtttccaccagagacccagtgattgttccactgaactggacatcaaggctaacacctggacattttataggctctttatgctgctgaataaacaggcagagaagagaatcactttcctagttagcaaagagaaactagttagctactatataaaggagacaaggaacccaggaagttctctggtgacccgtgtagtacttccttgtctaagggaagactaatggatatggaacaggcaatgagagaaggaagttaatatcaacacgacctcataaaaacaagaacatagaaagcaggaatattttcttccttgcctgttgatatgtatacatgtttgcactggcacatattaactaatgtctcttctctctcctttgccgtttttattttatgtaaagattattagcagtggttaacttcacaatttcatctttaagttacaaaatattcagatgggaccatgactagttttgaggggtgatcaacatcatctagaaacgagtaccatgactgtcactcagaggaggatataagagctcttgggattttatgtctcctctctttgagaacactgtgagtgtctttgtacaaaagataattgcatgttataaggtaaaggtgtacgtttgttgttatcattagatggtgttcagtacatgtagatggatgctgagtagccaaaggggtggaggactgtgtcagctgtcaagctatcatctctcaactccgagctcacccttctatttatttatttattcattcatttatttttatttttatttttattttttttttgttttgttttgagatggagtcttgctctgtcacccaggctggagtgcagtggcgcagtctcagacactgcaacctctgcttcccaggttcaagtgattctcctgcctcagcctccagagtgcctggaaccacaggtgcctgccaccacacctggctaatttttgtatttttagtagaggtggggttttgccatgttggccaggctagtttcaaactcatgacctcaggtgatctgcctgcctcagcctcccaaaatgttgggattacgggcatgagtcaccacgcccagcccgagctcactcttctaaactctacgttttggtgctaagattggggctctgcacataacatctctccttcgtcaactggctccttgttgggttctgcctgtaggaggactagagagaaaccaaaggctggaggagagaaaagaggcatatgctctttctgctggcttattcttcttgtccctgtctctccagcaacagatctccccccgagcagcagcagtgcattccagtagccagtttttactgcacaatctcatcatgctccttcagagatagcagcaccagtcagccaggctgcagcgtctgaggtctaaacccagctccatggggcctcttcttcaagcttgtagagtcagataaccacgacatctcccttttgttctgcccatcctagggatgatggcttctttctctagttcctctaaccatgctacttcaatgttctctttgggctttttcagtcctccaatacctgtttagccaattctctatattaaattctctgttaagataactggtgtggtttctattttcctgactgaactctgactaatacaagcaggcaactgtaattttttattataagcctcctatacaattggaatttgtttaaattctgcatgtatactactttttgttacttttttccaattctgcaatgtaattgcaaggagagtgcagttacagagtactgccagaccatttagaagaagaaactcctcggccaggcgtggtggctcatacctgtaatcccagcactttgggaggccaaggcgggcagatcatgaggtcaggagatcgagaccatcctggctaacacagtgaaaccccatctctactaaaaaaataccaaaaaaaatcatctgggcgtggtggcgggcacctgtagtcccagctactcgggaggctgaagcagaagaatggcgtgaacacaggaggcggagcttgcagtgagccgagatcacgccactgcactccagcctgagcgatagagcgagactctgtctcagaaaaaaaaaaaaaagaagaagaagaagaagaagagcctcctctacactgggttggtcatggaagacttcctggaggaagtgacatctaaacaaaatttgaaaaactcattgaaattaaccaggcaaagagtgtgagatagtaagccaggcatagggaataaatagcaagtacaaagggaaggaggtaataaggcctcattaagttcaaggaagagtccggctggagcattgccagtgtcaagacgggaggctggggaggagagaggtgattggatcagaaaggacctctgcaaccttagagaggagttgggacattttcccagggactgtgaagatcttagagagtttcaacagggaagaggcatgactgtatggccggcagcagacacccaacatccttgtgcccaccttgagcacgctggcccttgctctcggccaagtcacatcatctccagcacttgcccaaactccacatctcccccgtcttcccaggcaggcgcctcctcagaacacatctgtactgagtttccccctcagaaaccttgttaggacactagttagtgtgataaactaattcacggtgaagtgttagcaaatgaaaatggtttatcgctcctcggggtattttcattttaaggagactccgttgacaaatatttactgaatggtctattacatgcaagaaactatgtaaaactcctagggggagtcacggcttgacctaaataaatcagtctctaatgatagaatcctaggctcaccgggaagcattgcaggcagcacacagcctttcttatctctgcttaaaccacattagcctctctcttgatctgccctccatcccgacccccactcctcccctccaatggggctgagcagaggccgtggcccccgatgtttaactgtgacttccctgagtggtgttgacattgctgggactgtattgggggctcaacagtcaatcttcgccccatgttttggaatccccaggtctgccccatgggaagccagaaggaactgtactgagggagctccatctcccgtccttggccacgctctgcccccacctccacccagacacacttacggagggcctcctgcacacctggccctgtgccaggaataagggccagggagcagggggcaaggatggggaacagcacagaagtcccacacctgcacttcatttcagcacgagatggattctcccttgaatagtggagcctcaggccgggcactgtggctcatgcctgtaatcccagcactttgggaggctgaggttggtggatcacctgaggtcaggagtttgagaccagcctggccaacatggtgaaaccctgtctctactaaaaatacaaaaaaaaaaaaattagctggatatggtggcgggcacctgtaatcccagctactcgggaggctgaagcaggagaatcacttgaacctggaggcagaggttgcagtgagccaagatcgtgtcatggcactccagcctgggcaataagcgatactctgtctaaaaaaaaaaaaaaaaaagtggagcctcctcacctggttgattctcctcctctctttctgtgtgtgtgtctctctctctgccttctgagataccaaactaaaacagaaaggaggatgagaggcaggaaggaaggatgaatgccggaatgggatgaacagtgcttttccagctgctggtcccccaagtcctctctctcaccccctctctcattgtcaggctccactcctcccaagctggattccccagaaccaccctcatcccctccggcccctccccacttacctgtttgcaacgcccttcttggacagcacaggtgagacatcccgaataaagacactgaacaaggaagtggaagccggaaccctggcgctttcgtcagattcactgcatagtgtctagagaagcttacctgtgccttagctaagttcccaggactcactattcccatctataagatgggcacagcccaggccctgttatccccctaggaccatctagaccttccctctccgccagcccttcccaggctcccccttccatccattaagaaacactggcatctagtggttgtgtgagggacctgcagcgcagacccggcttccaagaacagggcccatagatggagaagcctctgacagccctatctagaaacaaggagccccgtattccatactgccctctgcagcatccctccctctccctctgaagaacccccaagacccccaaacaacatgggagtcaagaaccagtgttgaaatggccatgttgcccatccttgctgaagaccacccagacacctccctggtgatgaggaggggagagaacctgtggatgaaacaccccatggccaatccacaaagtgagtcattaggagctgagcacaagcccaaattccagacaaataggacagcttcctaccacggtggctgccaatctgccagccactccatcatgtgacccccccccccagacacttagtcagcactcccaggtgcccagcatcataccaggctgttgacagtgtgtgcctgcatgtgtgtgtgcatggatgagcacagggagagatgtgtgcagaggaaagaagaggcacacagcatgagtcactggcagacataagcaagtgaaccataaaataatctaaattcatttattcaacacatacttcccaacacctgctgtgcaccagagagagctgctcccaagccaccaagggctcaccccaaccctaccacctgacagctacctgaaaatagtctaccccgcactcctaccctccagttaacctactttgcatacgttaaagactgttttaccattggcttgcatctctgcatcccctgtagctaggtctaccccgcactcctaccctccagttaacctactttgcatacgttaaagactgttttaccattggcttgcatctctgcatcccctgtagctagcacacagaaggggcctaatatgtgcttattgaagtcattaatccagtccagcgcctgccaaagcgggaatcccttctgataacgtcaccgatggctgctctcccagccccctcaagggccaccggttattccgtatgctgttgtgtccgtcaggtttctgtggcaagggacagaacagcaactcggattcactggagtagagaagggagctgcacaggcagagagagcagagttgggtgctggcaggtgcggattgagggtaagaaagagaacggagtcaggtgctggcaggcctggatgaccacatctggttttcccatccttttattctgttttccttagccccctgccatgcccatatccccatctccagactctgcttctgtttgttgctggtcctagcctgcccttctgcataccagctgccttcatgcagcaggaggaagggagatggccacaggctcttccaggcttgcacgatcctagcacaggatcccagaggctccctctccctctcctgttgaacatatcttttttttttttttttgagacagcgttttgatcctgttgctcaggctagagtgcaatggtgcaatctcagctcactgcatcctccacctcctgggtgcaagtgattctcctgcctcagcctcccaagtacccaggtagctgggattacaggcacctgccaccacgccaggctaattttatgcttttttagtggagatgggggtttgctatgttggccaggctggtcttgaactcccgacctcagaagatccacccgccttggcctcccaaagtactgggattacaggcgtgagccactgtgcccggacatatcttgaggaatatctaaatctcaggaatgactctgtctggaccagttccgatccctgagtccccactgcccaacctcctgtccattcttaaggcctgagagacaggtacaatgtcccagggcacacatgtctgcccctgtggtcaaggggaggggaaaggacactgttactacctgcccatcagaattgtgtgcaatgggaagtaggacagaagaatcttccaaatgagggagggtatcttaccaggaagagggaaggagacatgccgagaaagtgcagtgtttcaacagtgtcccccaaaacattcacttccatctgatcctcaggatgtgacctaatttggaaatagggtctttgcagatgtagttagggtgaggatcaagcagagattatcctcttgataatctctttgaagggtgttttggggggccagccgtggtggctgacgcctgtaataccaacactttgagaggctgaggtgggcagatacctgaggccaggagttcaagaccagccaggccaacatggccaaaccccatctctactaaaaatacaaaaattagccaggcgtggtggcacacgtggtggctgtaataccagctatttgggaggctgaagcaagagaatcgcttgaacctggaaggcagaggtggcagtgagccgagatcgcgccaccgcactccagcctgagcaacagagactctgtctcaaaaaaaaaaaaaaaagaagagattatcctggattagggtgggtcctaaatccagagagcatgtccttttaagagacaaaaaaggaaacacacagacacaggaaggagaccacgtgaggatggaggcagagactcgagtgatgtggccacaagccgagggacaccaggagccccgccagcaactgggataggcaagaagggaccctcccctagagcctcagagggagcacagcccttccgacacctggatttcagacttctgtgctgaagaactgggagagtatcaatttctgctgttttaggccaacaaatgtgtgatcatttgtgatggcagctcttagaaaagaacccaggaggccaagaccaaaagtcgtccactgtgccattttctggggtggcagatgttttagggggctggaaagcacctggtggaggtgtcagctcacttcccagagccacgcccaccagccgccactctgctgcagagactcggctcaggaccactcctccctgaactgtctgtctagagcctgcacacatgtgtgacatggcagaccctaaagtgtccagagattttaggacctccccaccaccaccaccatcaaccacttatgagtaaactgaggcccagagaagctaaacagcctgtccccttcagatagttagaagaatttctgaatacaaggaagaattcttcagtaaaattgatacatgacctctttctttcttctttgttaaaaaatctgattaattagtaaaagctggagtgtttgatagtcactgctgagaacactggaatcgtcaggaagctaaatgcttctgagcaacgggcaaagcgctggagatcaagcgggcatttttttggcctaagattttgacagggtcaagaggacgttcaacccctcactgagccttcgcgctccttgtctaatttaattgtttggaagtcagaaagtgcagtagctttctagtttcttcttttccaggctgagatttcattccttgaaacattcttctttccttgatacagtttgcaaggcctccaccttgctggcaagcaatctgtgcacacactcaccgctcctcactgcagcctcactgctgggctgcctgctctggccctgccgggagacctgggctggggcaggatggtggccgctgcccggaggcacggggcggggagagacgtgttgagatcaggcctctcccatcagcccccaggcccaggagtggacacaaaacatggagagcccagctcctgactcctcccattccagccctcccagccccctccacagagaaatccagagcccatcccaggcagcttctccaggcagcaggtggttccacagcctaattcaggacctctaatctccccccaggtccccagcttctgagactttgacgtactgactcctgcctcccacctgcgaagcccagcaaagctctcgcctttctcccactcccaagagttgacagactccaggctgcttttcagatgatttggggaccttcctgggagacactttgaagcctcttcaaagccaactgtgttgtgagcagctgccaagctgcagaaagtccccgcagccctgggccacctctaattaccaagcccaccatcaccctgtcagtgcctttggtgggcccttcctctgcagccagcagcaagtgcccatcgtcacccaagagcaggaggagggagaggagtctgcaaggaacttcttccaaagaacactgcacttccaaagaactgcacctgaggagttcccgtgaacaaacgtgaacaactggtctgatatttactaagcgccaggggtgcccctgtgctgtctcacactgagctaggcacacgaagaaaatggaagttgtgcaaaggctcaacttctgttctccccagtttctctcctctgcactttaggctctgagctgctgagctcccagcccaggctgtctccagctcctccagcctgagaaaggagcacagatcattgattctctcctgggctcctcacccacccctccccttgtctccacctcattcccctggatccttagttaagaagaggcaaatgttccttctccattagcagcatcatttaaacagatggctgcagggcagggcccgaagcctccccatccccaggccctgcagcttttccttctacctgcttcccactccccaccccaggctgggaagactggtgagaggctgctgggttggctgggggagaccgaggcagcaagtggccccagagctccgcaggcctacctgcccccttaagaaccaagccccctccccaccctgggcctgtagcttcagagcatggggctgaatctcatcaacaagaaatttgaagccattaaaatacaatgaaagagaaattaaatgtaatcgctctgtaaattataactaattgaaacatcaattgtaatttttatgatctgcattcagagtgagtgatggtggagttgcaaaatgaaagttaaataatggtggagatgtcccgaaatgccctctggcccccagcctctgcctccctcctcctgcaggcttccctcccttctcttccagaccctgcctgaaagctctgccttccggaagtttcctccatgtaactgcttctcatggcctcagaggcctcagtctgcccattagggggcctcctatattggaaggcctcttgtatagggcctcagcaggccctcctgtttccctgcaacccccaaaaagggctggaaggccttcctggttccgcacatttggatcacgacccccaggtcccacccaacatgcttggccaaactccaagctcggaaatggcagacagagtgcctggagcctccgattctcccagaacttaccctgttgcagccacatggccatggagtcatgagtctggaaggactacaggtcacctgatccattcccctgcctccctcccagctccagcaaggagctccagggccttgggtcagttgctcagcaccagcaccagcttccctcccctcgtcccatggccggcagtgatagggaaaattcgagtgacccttcccaggggtggggaccctgccatgtttgggccacccttcctcctccctgcttgccagctatccgctctgtgtgcggcacccatgagagcgtggcatccacgagagtgtggtgtgtgtgctgcagaggcaagcagacctgcattacgtctccaccatgagggcgctgccgcttggctcttctcagactccgtttcctgagcagtaactgagagacaataatgacattcctctgagagggctgggctgtttagcaacagcagcatttgtgaagctcttagcacagagcgggcacctattaaacctagggatgattattgtcatcgtttgtcattatgtagcccagctccaggctattttcattttgctcccagcagatccctgggacctggtcccttccccccgacccctgccaactccctctccagtacattggctgcccctgtgcagatcagaggcaggcagctgggtacaggtgctccccacaccttctcctggctgaagacttcttaggattttggcaggaaattaatgaatcttccacagggtaagaaaacaaacccctggtctccgctcctcctggcagagacagggcagctcctggcaccctggatcccagcaaactggtcgctgactgacggaggaggcctggtctctgcagtggccaactcccagctgaagtggacggggagacaaggtcaggaaggccagtccactcccacctcctcccagaaaaagtcttgaacaagctttattttgatggctcggtgtagtgactaatgcctgtaatctcatcactttgggaggccgaggcggatggatcacctgcagccaggagttggagaccagcctggccatcatggtaaaaccccatctctactaaaaatacaaaaattatccgggcatggtggtacatgcctgtagttccagctactccagaggccaaggcatgagaatcgcttgaacctgggaggcggagattgcagtgagccgagatcgcaccactgcgctccagcctgggcaacagagtgaaactccgtctcaacaacagcaacaaacaaagttttgttttgaggtacagatttctagaattatcacatccccccaatgcctgtttctcatgaactgacctctgcctagaaccgccccatcgcagaacataacagacactgatttccctagtgctggttccgttgggcgggagtcaggacctgagccctgggccgcctgactttctcacccagggagcctggtcgctcctccccttggctggcacacagcttctcaccggacagatgagctaattcagtgcatctccagctacccgaggtgcaggacctgtgggtttttttaattaccagtctgtgacagatcaacaccttaaaatatttttattaagatataattcacgtactgtaaagttcactcttttaagatgtgcaatcccgtggttttcaatgtatttcagaacgttgcacagccatcaccactacctaattctgcaacattttcatcagcccagaaagaaattcatacccttagtacttactcctcatttcctccttcacccagcccctggcaatcactaatctactttctgtttctgtggatttgcctgttctgtacatttcatataaatggaagcatgcaatatgtggcttctttcacttggcacaatgtttgcgaggttcatccatgtcattgcatggatcagaacttcattcctttttgtagttgaataatattccatcccataggctgggcgtggtggctcatgcctgtaatcccaacactttcggaggccgaggcaggtggatcacctgaggtcaggagttcaagaccagcctgaccaacatgatgaaaccccatctctctaaaaatacaaaaaattagctggatgtggtggtgcacgcctgtaatcccagctactcaggaggctgaggcaggagaattgcttgaacccaggaagcggaggttgcaaggttgcagtgagctgagatcgtgctactatactctaacctgggcaacaagagtgaaactctgtctcaaaaaaaaaatatatccatcctatagatataccacattgggtttttttctggcaggagtggggggtttgttttgttgttgctgttgttttgagatggagtttcactctgtcacccaggctggagtgcaatggtacaatctcagctcactgcaacctccacctcccagtttcaagcgattctcctgcctcagcctcctgagtagctgggattacaggtgtgtgccaccacacccggccaatttttgtatttttagtagagatggggtttcaccatattggccaggctggtcttgaactcctgacctcaaatgattcacctgccacggcctcccaaagtgctgggattacaggtgtgagccaccttgcccggcctagatataccacattttgtttatccgctcatcagttgatgtacatttgggctgtttccactttttggcaattgttagtgatgttgtaacaaacatttacgtgcaagttttggtgtgatcatacgttttcaattctcttgagtatacacctaggagtagaattccaggttgaacttttttaggaactgccaaagtggtgttaccattactgtgtttgcaaaaacaagataaatattaattattagaaaaaataaatttgaaataacatacaaaacgcaaggctaatttttattattaaatcaaaaggcataaaattagcttgtcaaattgctacgaccgtttctaaatgcttcctctcagtttctagacttgcttggtcaatgatgggtaacacacagttcttagactggcactagccctcggaccacactttgagtagcctggaccgtctgcatcctctccactgcctccagcataaagggcagccccttggtgtggggtgcaagccccatccaacactggcccctctggcctcatttcacaccagccacactgtgtgcccgttctgtacccaggactcccttcctggcccccttggactgattgttttgagatggagtttcaggcagatcacaaggtcaggagatcgagaccatcctggctaacatggtgaaaccctgtttctactaaaaatacaaaaaaattagccgggcatggtggtgggcgcctgtagtcccagctgctcaggaggctgaggcaggagaatggcatgaacccgggaggcggagcttgcagtgagccgagattacactactgcactccagcctgggtgacagagggagactccatttcaaacaaaataaaagtgatgagaagcaaaagctgtgtaaggctggtggctcccctggttcttgggttatgaagtggcagggtctctcttgagctgagatttgtagttcctggttaaatgccagggtttaatgggcgtgctagggaaaatgttttttagtgagtggtaaatgtctccctggtgcctgcggtggtaattacttcaatggcaccatctctctttaacatgctcctggccagggggaagggaggggctctgaacagagggaccaactctggaagctgtggccaagggcatctcttggaggaagccgagggagggaggaggaagagacagaggtgagcccacacctggcccaagccaggatgacagcggcccggggggccagggttcagggcagccaaggcagggatgtgtgtcatgtgtccgcgcttcaggtctgattattgggtcattattgggtctctacctggatgaggttacaaggaaaaaatttttaagtttttattgaattataaaacacatacctaaaatgcacgggtgatagtgtttatttagcaaggcaaattttcacaaggtgaaccttacagcaaagcagctcccagagcaagaaataaaacagaacagaacaacccccgcagaagcccaaaagtccttcccagccactccccacccccaaggtgaccattgtcctgacctttgtcatcatgtccgttttgcatgaaaactttgtaatgtcactggggatggtcaatgctaaggaaatcacatatatgggggactcagggggcacagaggagggacatgtcacacaacccacagcttggagaagactccaagaggaagtgatgtctgaaccaagtcctggaggatgaagagacgtgaaggcagaggtggagaaagggggggtgcgtgcgtgtgtgcatgtgcacgtgtgtgcgtgtgtgcgtgcgagtgtgtgtgatgtgtgtgcatgtgtgtgcatgtgtgtgcgtgtgcgcgtgtgtgcatgtgtgtgcacgcacgtgtgtgcatgcatgtgtgtgcatgtgtgtgcgtgtgtgtgcatgcgtgcgtgcgtgtgtgcatgtgtgtgccgtgtgtgtcatcatcctggtttgttggttccttccatctctggctattaatcttctttccattctgcaaaattacatgagttcaagaagaacttaggggccaggcggggtggctcacacttgtaatcccagcactttgggatgccgaggcgggaggatcacctgaggtcaggagattgagaccaccctgaccaacgtggtgaaacccagtctctactaaaaactacaaaaattagctgggcatggtgatcagtgcctgtaatccaagctacttgggaggctaaggcaggagaattgcttgtgcccaggaggtggaggttgcagtgagctgcgatcgtgccatcacactttagcctgggtgacaagagcgaaactccatctcaaaaaataaaaaaagaagaagaacttaggttagcttgaggtttctcagtatccacactatttattgacatttcaggccagatggttctttgttatggggtcatcctgtgcactgtaggatgtttggcagcacccctgccctctacccactagatgccagtggaaattctcctcccaagttgtcacaactaaaaatgtgtcccaatgttcctgggggagggggacaaaattgcccttctctgtctgagaaccccagattagctgaagagaactaccagtggccaaaaacgtggtgaataaaggacgtgggtgagctgtcaggaggatccgggcagagactggcctaccctgtgcctggaggcagggagatgaagaggttgtgcttgggagggcctgcctgacccccagctccaactctggtcagcatctcccagcaaccagtggggacctaggaggttgcaggtggtcagccctaggactgggagcaaagaggagagacagggaggtgatgtctgaaccaagtcctggaggatgaacagatgcaaaggcagaggtggagaaaggtgtgtgcgtgtgtgtgtgtgtgtgtgtctgtgtccctgagtggcccaagccaggagcaggacttgctccctgctctagggagataaaggggagaatatcacaacggaagggccttcctgctgctgagatcggatttcaattaaaatgattagctctgtttatttagactccacagctgcatacaatctattgcgtgttattgcgagtttaaagaaataaaggaggggcatggggggaggggaagcatttcagcccaaattgaaaaagtcctcctgtaattacgagactggagaatatccgcggaggggatcaataatgggaaatctaagtgccactgtttgccgagattacagttttgaatcgctccatcttggattttaattttctttctcattgtcgcatcaccctgagctgtgatcccagccccacctcccagcttcagagacgcaggcagtagggctgaaccaaagcagggaagtcagggcacatctgaccttcttacaaaccttttattgctgtgtaacaaatgaccacacacttaggagcttaagacaatacacgtttattgtctcacagtttctgtgggtcaggagcctgttgatggttcaactggctcctctgttcagggtcctgagaggcagcactcaatctgtctcctgggactgggtctcatctgaggttcagggtcctctttcaagcacatgggatcgttggcacaattcatttccttacagctgtagacttgtggcagcttgcttcttcaaaaccagcaggagagaggctctgatgtccaggtcttcttttaaagtgcttactgagctgggtgcagtggctcatgggctgggggcagtggtgcacacctctaatcccagcactttgggaggccgaggagggtagatcacttgaggtcaggagttctagaccagcctggccaacgtggcaaaactgcatctgtattcaaaatacaaaattagccaggcatggtggtgcatgtctgtgatcccagctacttggaaggctgaggcataagactcgcttgaacccgggaggtggagtttgcagtgagctgagatcacaccactgcactccagtctgggtgacagagagagactccgtctcaaataagaaaataaaataaaataaaataaaataaaataaaataaaataaaataaaaagtgctcgcctgattaggccaggcccatccagaataatctcccttttgatcaacttaaagttaaccatttagggaccttaatgacatctgcaaaacctcttcaactttgccatattcttttaagagatgagatcttattctgtcatgcagcctccacctcaacctcccaggctcaaggaatcctcccacttcagcctcctgaatagctgggaccacaggtgtgtgccagcatgcctggccaattttcttttgtttttagtagagacagggtctcactatgttgcccaggcttgtctcaaactcttgaactcaagtgatcctcctgcctcagcctctcaaagtgctgggattacaggcgtgagccactgtgcccagtcatctttgccatattctattaaatagaagcaagtttcatgtctcacccacacacaaggggagggaatcatacaatgggtgtgtaagtccttggggttcatcgtgcaattctgcctaactcaccttccattgagctctctctctccagcctctcctccccacattcccaaagccaggccttgaaaagacatcccttcctgagccatcctcaccaccacttgcctccctagtcccagcttgctgaactgaccccaataaacaatccagcagccagccttgattgaaagtcttcccaaataggagaagaaatgaagaaaacaaccaagaatatgacataatcctctgactttctgtccagtgctcttccctgtagaccaggtttgctcccactggtctatggtctcctctatgtcccaaacaccagccaggattcctggctgccctggcccagcagccttgacctgttaccgtccttctcaggctactgagcacaaggtgagatgcaactgagctcttccatggtggatgaggagaggagcccactgtcatcaaaagacccacacttctatcatgttgttgcctggcttccaagtctaagacggctgcttcagctccagccatcactcccaccatccagccaacagggaggaggaagggaaggaaaaggacatgtgctatgctttgagtgtttgtcccctttgaaactcaagccgaaactcatgttaaaacttaatctccggtggaacagtattaagaggtgggcctttaagaggtgattgagtcacaagggataaattcacgggttaatgagttatcctgggaatgggttagttatcaccagagggctgttacaaaagttagtttggctgttttttcttgtcctctcaccctgtgatgccctgtgctgcctcgggactccatatagagtccaaatgagcaagaaggccctcaccagatgcagtcccttgaccttgaacctttcagcctccagaactgtaagaaataaatgtgttttctttacaaattacccagtttcagatattccattacagcaacagagaacagatgccagctccctttacacatctccttacaccccattggtcataagttagtcacatggtcacaaatgactgcaaagagtgctgggatatgtagttttattatgaacagccctgtacgatgggaggatgtaggagtggatgtggagatttctggaaatctctgttctaacttccctctgcctggcttgtgtatgcaatctaagggatgggatgtttcttttgaatccagatccttaccctccctttcaatagcgtggcctatggttccattgctattgatggtttcatcaaacccattattcatgcattcgttccttcactcctctacctactcatttgttcactagttcattcatttagtctcagaaattctcttcctatgtctttcacaataccgggcatttggtcagcattccagacgtgcagagaatggtacagactctgcactcaagttactcagaagctagcagggaaaacagccaaggaaatgtatcattttagcaccatggcataggcactatgagaatgtgcagaagtcatgtaaacactgtggccctcatccatgtggggctgtgtgcaaggtttgcaggggaaggtgacaccccatctgagtcttggtcaaacaaactggctgggagcaaaaaggaaaaagcattccagcccacaggactttgaagaacagtgctggccctgtccgtggtgctgacccacaggcccagcctggagcccagtttcaagctgagatcaagccagtccctgtttctcccaccaacctacccgctctaggctggcacacaggggtgggctggtgggatggaagtgaggtggtatttagctacatacttcattttcataatgaccttcccgtttctcctcgcttgtcagtctgtgaccattaaattcctcattagcaaacgagatttggatgagcccattaagatgagggatggcctcacagtgcagctgcctggggtgagctagaactcaccttctccctccctattagaaaacaatgcacctcacattctgtgcacatttctccaggtctactacctagtccacacaggccccttggagttattcagaggaccagcttaagggacggccagggcacaacagaaaagcaaacagcaggacaactgtttgctcacacatatacccagagccacccaatcagggtctgggcgtttgctgcttcatgttaaagctcaaattcccaaatgtgacgttcaaacccttcccagtcctctctcagtccacctctccagcctcttctcctatcctccccaagtgcctctgcattttggcaatgacagatgacctgatgctgtggcatgctggaagtggttcataccagcacccagcttgtgagagctgctttgtacatactcaaaagttttgcaaggcaattggcagcttgaaatcagccgtggtgagagtatttacaccacaggaatcagcaaatgccacagttaaggttttctggcttttttttttttttttttttttggtcagaaatctggattttaggccaggcacggtggctcacaccgtgcactttgggaggcctaggcgggtggaccacttggggtcaggagttccagaccagcctggccaacatggtaaaacccatctctattaaaaatacaaaaaattagccaggcgtgatggcaggtacctgtaatcccagctactcgggagactgaggcagaattgcttgaacccaggaggcagaggttgctgtgagccaagatcgcgccactgcactccagcctgggtgacaagagcaagactccgtcacaaaaaaaaaaataaaaagaatgaaagaaatctggattttaaacatttgccaacacacccctgtctgcaggcctctgagcatgtcacgcccttgcatagccccctcgacctttaatgctgttccctctgccaggttccactccttcttcctggaatgcctcgccagtccctcttccctgcctggtgaaaacctagacatttgttcaggccccagggagtcatccagctccccattcagtgttcccacagtgaaagggtcttatgccctaggcaggacttctcgtcttctcttccaccttaaccaggacttctcattcgctttccattttggggaccacaggtgagcaccaccatgcctgggaagggagctaaaggaaaaagcagaactatgggggcaggaaagttcacaataccccggggcagaaagtacagctggtttcatggggacaaagaatatgtccagcaagcagctgccctttttattattattattagtattattattattattttgagacagagtctcactctgtcgcccaggctcggttcaagcgattctcctgcctcagcttcccaagtagctgggattacaggcgtacgccaccacgcctggctaattgttgtatttttagtagagacggggtttcaccatgttggccaggctggtctcaaactcctggcctcaggtgatccacccacctcggcctcccaaagtgctgggattacaggcatgagccaccgtgcccagccacagctgctctttttctagggccacctgctctctggattctgcatacaacaccccttatggcttccctcaaataatcaccctttgcccctggtttgcataaaatctcaggccaatcaaccacaaaccagagcatctctgagtctcagtcccaaccccaggattgtcccaggatagtctaatcatctgaggccatcaggcagggtgtggagctgggaaaacagcccatctcccaggctggagggcaaactccatcagcacagggaacatgtttcttcatctctaagagaagatcatgttctagctaagagaaggtgcttagtaaatatttgcagaataaatgagtcacctcacagtttgggtcctgctccgacgaacacatgacccagctggtccctggagaaggaggcaaaggctttgaggcattcaataaggcaacgctgcacactcaagtcacgaggcttccttgccctccagttactagctgtgtgaccttgggtgagtcacttaacctctctgtgcctcagaggcctcatctataaaatgagggtttcaattttgcctaacttagagccgtggtgaggattacagatgatcttcctggaacagctggagtggctcctggcgcatagtagacactcgacacagcggaagctgttgttccctgttctatgctgaaaccacaggacagggtccctctctgctccaccagcaggcttcctccccaggtctcatgtgactccagccagccacacacgctgaccctctgccaacccagccagacctctgttctcagggcgttaaatgcaaggggaaggccacgttgacaaccaactgcagccacgcctcctctgccctccccaggagcctgggctgaagacttcatctgctgtaattaacaagccaactgcagctgtcttgctccattaatagcagatcagcctgtcgggcgagggctgacagggaggttgtgaacagaaaggtaagaaggaagtgggccaggcacggtggctcacgcctgtaatcccaacactttgggaggccaaggcattcggatcacttgaggtcaggagttagagactagcctggtccatgtggtgaaaccccgtccctactaaaaatacaaaaattagccaggcatgatggtgggcgcctgtcatcccagctactcaggaggctgaggcaggacgatcgcttgaatccgggaggtggaggttgcagtgagctgagattgcgccactgcactccggcctgggtgacagaccaacactccatctcaaaaaaaaaaaaaaaaaaaagaaagacgtggacaggaccaggggcatgaagcagtggcatccagcctgcctttccacctccaccccttcccttaccccttctcctccctccacccctgaggctgactttccagaagccacaggctacagggaaggggaaagatgactgagtgacgggaacagcccagacccacctccaaagtgctcctgacagcaggtgggggttaggaacagagccatggcttggaggcccagactgtggagagcagccatgccctctccagaaacccttcctccccaagactcagccaggcaggagactggttaggggtaagggccacttctacctccattcctctttttccaaagatgttgcgattcctgcgacatgggaacacgcagctgctggtgaggaagaggtggcttcttaccacttaggtcaatgacagccacttcctccctttttaacaagcaggtacatctcctccccatcccccagcattgagtctagattcgcacaaattgttttgttactgttgcttgcacacaccagagaagaaaacagaagaaagaaggaacacagtgacccaggccccacctgtgctgaggggctgctggcctctgcgggtgagttcctggtgtgtctccttcccccaaatccctcccgggtctggctgctctaagcacgtgtgtgctcacaggcaggtacttgtgggctcgtctctgatgtatgcagcacacagacccctcgagtccctgcttctagccaggagccgtgtctttaatctcctcaccttgggaggcattgcagcactctggtaattgcttttggaaacatggtcaccagtttaattggtagaacttgtcctgggcggtgtaacaccaccaagcaacctcaggcctatctgtttctccagatgccttggcaggcacgtgactatacgtgcatgcaagctcacctgtgcattggaaagtatgtctgggctcagctgtgcattggagaggagtgtctgggctcatctgtgtgttgtgcaggctagctagagtgtgtctccaacctcagctaaaggcatggccaagatctacgggataagggagtgaagggctcctgagagctagtgggacaggatggaagagcaccagcccaagccctgggggacttctctgccttgtgaccagaaaggggagaggagatctcccacaaagccatccagacaccacctttgatgggctccttgcactgtgctggggagggggtgggctgtatatcttgctctgtgcccaaggaagaccgccttgaacctgttgagctcagccaatggggtgcccaggcagaacactgagagaaggaagggaagatcgtgagctcagcgcattcgtttccctgagaggcggccacgggctgagggcattgctcggctgaaagtcccagccccatcaagcagacccctcctcactgcagcgctgtcttgggtctggtgaccccctcctctcctccgtggtagtaacagtccccgctgacactcgctggagctccacactctcctctctggtgtcctgcacctgcccatgcctgcaaacagaccttttatgaaaattaccctcaaaacacacagtctggctgtgcctccacttcctgctaggacctcgaaggatccctcaggtgggaggcgaacagcatttgggggagacagcccctcctctcctgattgtttcttctctggtttccttctctgttgggcccccatggacagatgagcccagggtgagggtggcacaaagttatctcggggggacagggacagcccttctgcccctcgaacatttccctcccaagcctctgcaccagctctcccacaccccaagccaggctggccagccctaggcaggacacagaggggacccacgaccactcaggcctcctcacaagggccgctggcccacagctggaaggagggagcaaagtaggaggtcaggcgcgttggctcatgcctgtgatcccagcactttgagaggctgaggtgggcagatcacctgaggtcaggagttccacaccagcctggccaacatggcaaaaccccgtctctattaaacatacaaaattatctgggcgtggtggtgtatgcctgtaatcccagctaattaggaggctgtggcaggagaatcgcttgaacccgggaggcagaggttgcagtgagccgagatcatgccattgcactccagcctgggcaatgagactgaaactccggctaaaaaaaaaagaaaagaaaaaagaaataagggaacaaagcagcacctgggggctccactgaaaaatgagaggggcagaaggcaggaacctctggcagagggaagagcaggtgcccagcgggcaggacgggctcacagacagggtgagcaggaggagcagacacacaggcagcagcgggggacagaggagaggcaggcagggctgactgagtgtaggctgcggggctctccatggggtccactcttgcagcccagggagcgggtcagggacgcggcttcagccgtcagatgccagagattcccaggagcagttaccagggagcaaatcgctgtgctcccgtggagatgctgcaacccacccgcctgcgcccacccaaaggacactccacccacacgacccgggttatgagatcacctccatttcaccctgtgcccccatgccacgccccagcccagcccacacccacgccctccatcccggcactaacaccagcaaggccagaggtctgccccgccctcctctccctcctgcagggggtcggagcctgggggagagaagcccgcccacggggtcaccagccttcccctgggggactctgcctagcagaaggacccacaacccgtccagcactactgctaagacgctcgtgtcattcacgcccgggacgctcgtgatttatggactttaatttccccagatcctcagtggcttccctcctttccctctggcctgtcagggtgtttgtctcccagcacccccagcacccccctccctggtttttaatttgaagcatctgtctggagcatcccgaggaggagacgcctgcgaggctgaatgcatgaagcagctgacagctctattgatttcctctctcccaccgcataatgcaagatatatacaagccgataggccagccctctttgaagggtctgtgcccttttttctcactctgatgtcccctcaccctggcacatgttgatctataggaggggtgcttgtccctcatgctgaaaatgcattctcctctgcctcagtgttatttttctcactgttggtggatgaggcctcatctgtcctttctgtgcttgcagattggacacccaggaagcagttcttggagtgaaaggggccagtagggaaaagcaggggagctggggaggtgtcatctgtcaaaactgactctgccccccatggaggagatggtgcggggctttcggagtggccctccccagcctcacaggtctgggcaaggagggctgctttccactccagcccacgcctccaccaggttgcaggttttttcctccaaatccattggcaactcttgcctgggaatcacattcaattaacagccacagagccggctgctgggctaagcatttttctattcttggtgccttctggtttctcataagcagggcagctgcagacagttgtgcaggctgcacacaactggccgcagtggcctggatcctagcaggaattaatactcaacagaaactgaggctcagagctctcaggagactcattcaaattctcccagccagacactgaatttgaatctaagacttcctgcctccaggaagagttttcctcccaccctatcatactgcctcctccaggaagaccacctagattgataccactcaatctgatgcttctttcattcttgtcaccctggaacttatttgctatgagggtttgcacatactagcaggctcctctggaggtgttgggttttcaggacaaagcaatattctactcctctttgtgaatcaccatcgatgttactcctggaggactttcctggcctgtatcaccccttccccagcctgtatcagacccccatggcctccatctggtcccacaattccaaacacttcctacacctagggcccaacctcatcactgcctcccttactattctgtgtgtcccttgagatgggaacagggacaggatcttatttgtgcatcttcaccacttaggtacctagaggcaccttaaagacgtgccccatgcctctcctcccttctcccaccccagctccccaccccatcccgaggcttcccactggaaaaggtgtccccacccgctctgggctgacatcagctgccttgcctcccagagtagggacgaggctcctggtaactagagccgactgcaccccgccttgccacccgttgagcccgggcagaggcagcacccagggctgtcctccttacagcatccacagaaaagctttgaaaccctaggctaggtgcaaataagacagtagcctgagcccatgagttacctggccataggcacagaacagagatatccattatgaaaaagaatgtcctcgtggttttggccttctagtcaagcggctctcaaccacaagtggcattgccctgctttcccccggggacatttggcaatgtctagagacattttcgtttctcacaattgtgagggtctagcattaaccaagtaggggcctgggatcctcacaaggctcagaagagcctcagcccctaaacaaaaagtgaaagtgaccccatccacaaaggtcaaccatgtggggcgtgagaacccctgttccagtctgcctggcctttcttcgtggcttctagctcagcagcagggagaatgttaaacctgtctacctctcaggggctcacagactctttgggggccagggggagagtgagtaaccagtatccctttaaactcaccatcttcagtttctaaaaaaacaccagtgggccgggtacagtggcgcaagcctgtaatcccagtactttgggaggccaaggcaggaggatcgtttgaggccaggagttagagtccagcctgggcaacacaggggaccccatttctaaaaaaaagaggaaagaaagaaagagagagagagagaaagaaagaaagaaagaaggaaagaaaggaagaaaggaagaaagaaagaatataagaccacatgcttgtggtcccagctacttgggaggctgaggcaggaggaccacttgagcccgagaggtcgaggctgcagcgagcagcgattgcacctctgcactccagcctaggcaagagagcaaggctctgtctcaaaaaaataaataaataaagcaccaactcaccccgccacccgactccccatcctttcccaggtaaatgagttcagtgccagggaccagagtcccggcctgctgacaacctttaaggtttaataaacaactcccttccgagatggtttaaaggccagccctgccggcagccaaaggcaggggcctcttggagattaaatgagatggtggatatgaaagcactccaccaggtatgaaatcgcatacaaatattcccgataatttatggacatttctctccgcctgagctcccaggagtcgcgcggaaggggctattccgtttccagccgcggcctcagcgcccccgtgcggccgccagtggacacagcacccagggcgggccttgcctgagaggtgcgggttggagctttgcgaatcaccccatagaagcttcgctgcaaccctgcgaggcgggagagaggcgacagcacacacactcccacccccaaaacatacacacacgtgcacgcacacacacacagaaaccaggaaactaaggctcggaagatcaccgctgggcagtgaaggaggtgctatggaccccagggatgggcccttgggtgacgatgaccacagcgggcataagtgaggctggaaggggaactcctgaaggccctgaactccagcccaactccccctccagcctcttctccccgaccccctgccccagaccctccttacctctgccacactgaacttcccactcattctcagaaacaccccgcattctcctgaccctgggctgacgtcagctccctccctccttctgtctggaagtccttctccgggcaagctgctgcgcacccctctcggaggcagcagactgtgtcccctcctccacgaagccttccaggactccctcaggaggaattagacccctagcctctgggcatcctccacagcttattatgggatcccaacagtcatgagtgtttggagcaggaaccgcattctgcttattcccaagcccagcccgatgttcaccaagtgaacggaatggattgaatgggggaaaatcctggaggttgggaagtcttcccagccatgtgccgtgccagccctctgcccacctgcgagctggggcattggggtttttttgacccatcctggtcctctttccaatgtgtccctgaaaactgaagagagaactctaaaccatttggccttcagaggtggccagagtggggctgctggagggaggaggggaggcccggtgacttctgaggccctctctgcccagagccagcagagtgagggaagggaaggaaggaaaagggttggattgtgtcctgtagctccggacatgccctctgagcctctcctgcctccagccatgctgcaacacactgcttgagaccctccctaccgcctcttgacaacagcaatagccctcaccatcccacagctgccagcactggacattccagcctaccaatggccagagcgaccataacaggcagcctgggccatcctgccctcgagtccggggctttcctctcctgcaggatccaccctaggccctggagagttttgtttcatgtgtatatgggagtcatcagggaggctcatgtccaggtcagcatctgctcaaggtctcaggctgtggcactcagggcctaggctctgccccccttggtctctgacagtccccggccactccaggacatttggggctcatcttcccatggagcagggaagcgtgccctctgggcaccttgcctcacttttagtagctgcagcttattttgctatttgtcccccttggggagctggaggtctttggtacttgaacaaatttgccattgtgttttgctactacacgtctatggtcccttaaattatacaactcaagagggtgaacatctgtctccctgggatcgctgccaaaagggaggtgcagctcctccttctatccccgtccttgtcctgtcgggccggcagtgaggcaagaagcaccagtcattcattcaacaaatagtttttggacctactacatgccaggcactgcttcaggcacgtcagtgtctccttctggctctccctgaattcctccctccatccaccacccctttatatggtgagtgatctcagatgccgcatccagccggatcatcctgcaatgttagcattgagcacttactgtacagatgggtactgcacttcgagagttatcgacagaatgctgagccctgtccttgccttcaaggaaaagtggtaaggtggggcgtagtggctcacacctgttatcctagcactttggggggccgaggcaggaggatcccttgagcccaggagttcgaaaccagcttgggcaacctagggagaccatgtctctaaaaaagttttaaaaaattaaaaataaaaagagtggtgcgcatgtatgaaaagttaaacacctccacgcagcctacggagaagtgattgcaaggaaccactgtatgagcggcaagcaacataagtcaagggtgaagggtcctgcctgaaaaaggggaggcgggagctgagctcggaaggaccagtggcacttggcatcagagtggacagcagagcaaatacctggagggcagaaagtgcccaaaagtgcccctcggcttggctgaaagggtggttgcttgtggaggagcagtggggtagaaaagaccagaaaggcatcgcctgagatgggaagggctggcaaagccgggctctgaggtatgggaaaatccttctcaggtcagagctgaagcactcgtgcttctcagatcggatccgaccttcagacatctaaaattaggcttctgccaattaacttttcccactgctagaaccccgacacatttacagttgcagagacatcgttcagcttctttaaaagactcttcagtgttattacaatatttttgtgatctctctgcagcaaggtctattggttcctgtatctccagcacccccaggaaggtgctcagcctgagcttgttaatggaagggcaggagggaggaagaaaggaaggttaagttaaataagttctaagtaaagctcatggcaaagtgttctttcccttcaggagggccgctctgtaataataagcacgaagcaattacattctgccgtgtggttattaaattttggggaaacaaatataataaaatgtagacatttgtagggaggttggagataaaataaaaatggaggataaaaataaaatcgataaccgcaggttgctcagagtctaacctaaaggatgttagggggagaaaggaacgctgccctccccaggcttcccaagcctccccaggaagtggccggagcctgggctggggaatctgcccagcaggggttcaactcctgagtccacctctcccctctggggccgcggtgagaccccgcaagagcaggagcactcccactcaccatcagccctaggggtgagacacttagccaggggcagcgctgcgacagcttttggaagtattattattattatcattattgctagagatggggggggggaggtcttactaggttgcccaggctgctctcgaactcctggcctcaagcgatccgcctgcctcggcctcccccagtgctggggttataagcgtgagccaccgcgcccggccttaacttgctttcattgtacaccaattcctaagggaattggaagcagcaagcaggaacgctccctcttatggaaagaagagcccagggccctggtcatgacaggttcaggtgccaaaaaggagacgggaagaaaacgtgaggcgccagaacaacaggttctacaaggtgcacacgagggtccctgccattgaatgaagaattttctgtgtggatgcccctgcgcaggtccaatgaaagccgtggagaataagcgttagctcttcaaactgaatctgagctaaaacctagcaaagccaggctggggtctgaggggttgcgggggaagacaggaaggggtggacggggaagaggcgggggtcctaggaggaagggatggggaggagcgagaggagggaggcggagggagggcggcagccaggatggtccattccattcttggagctgcactgttgacttcgaccacaagggggcagggctgctgaaattggaagtgcgaacgcctacatgagtcttgatcctcggcaggcaccgtacccagtttcctccgttgggagggtttaactgcccggaaacggaagtctcgttctttttcgtccttttccccggttgctgcttgctgtgagtgtctctagggtgatacgtgggtgagaaaggtaatctggggcaatccactgccaggtgaaatctggggaccccaggtccgcgtggagggtgtcggggaggagaaggggagtgcgatggggccgatatttcgggggagagcgggaaaacggggttcgctgccagcccccgcgccgtgttaacgccgaggactgtttcccgcaggtcctggtccgcgccagagcccagcgcgcctcgtcgccatggtgagtacagtccctgcctggcgccttcccggggtgggctcgtggggccccggggcgagggcgagagagcctcccaaggatctcctgaggccgggagaagctggtggactgggccatcgccgggagacgtgtctctttcctctctgttcacccgcttcctttgtgttgcagcctcggaaaattgaggaaatcaaggacttcctgctcacagcccgacgaaaggatgccaaatgtaagtggttgctccgaaggttcaagaagagcggtgcctagcctggcaccgctccgggagcgtcttccccggaatgtcaggcaggagacggttaggccgtctgggtgtgtgcctggccctctgggagcagtggtttcatcctgtttcccatgagaaagacctgtggggggcacgttgaggccctggaatttctaggaccatctttagctaatcgcgatcatctcagaggccgccctgagttcagttttctttcgtataatatagtaaattgtcggaacggaatctccactccgcgaaagcctcaaaacacacgtcccataaacactgtttaggttctctgcagttgtgcaaaatcttaacacaaaatccattttgtaataaagtgctggatatttgcatgtaatgtatcgagcacggcacactgtgtagtatggtcgtttacctcgtgatcctgtggtcgctggccagtgtcagaaggtatcatacctatctaatccagaaaaatatttaaaaaaatttttttttttctttgagacagtctggctctgtcgcccaggctggattgcagtggtgcgatcttggctcactgcaattaccgcctcccaggttcaagcgatccccctgcctcaaagtagctgggcgcgccaccatgcctagctgatttttgtgtttttggtagagacagagtttcaccatgttggccaggctggtctcgaactcctaacctcagatgatccacctgcctccgcctcccagagtgctgggattacaggtgtgagccactgtgccccgccaagatcaaaatttgaagcagggcttctactgaatgtatatcgcattaccaccattgtaaagtcacagagtttaagttggactgtcataggtctgtttcccagcttgtacatacaggggaaagaaggtgattaatgaaaaaccttaaacagcaggttttcgatggataggtgccaatctctgctgcccacttacttaaatttttacaccaagtgtgagaggtagttgtgttactcctttgtgatacttgaaggagattgggggggcttgtgtttgatacaagctaggtcttgagttatgttgttactttaacccagtcatcttttttcagctgactgagaatcaggtcacatgtggaagtgaggttgcatgggacaggcctgttaaggtgggctaagacaccagccgtctctaatgctctgccagccgtggtgccagacggtggttggtgtacagggagagtctttcaatgagttgggggtaggcagagatgggggtcatatttgtgtccccattacccaaaacaggctgtcacctttgaggtagtgaccacctgtggggacaaatagcatctggtgggaatgatgactgttggctagtgttttgtgtaaagagatgaggttatcaggtcagttttatttcagaccatatggggtcactgcctagtttgaagcccaactctacctgcaggtaacttacccttctcagcaagttaaacacgacaccaccgtttgattgtgttttaaaagggtggtggtccgggcgtggtggctcatgcctataattccagcactttgggaggccaaagcggacagatcgcttgaaccaggagttcaagaccaacctgggcgacatggcaaaaccccatttctactaaaaataaaaaaattagccaggcatggtggcacacgcctgcagtcccagctactcaggaggctgaggcaggagaatcagttgaaccaaggagacggaggttgcagtgagctgagattgtctcactgcactccagcctgggtgacagagcgagactgtctcacaaaaaaaattgggaaccttcattttagatgatgtggctttaaaggtagtggtcacagtcccctggggacagtaaagtgtcagtagctgtttgttgaaaaaactttttaaaatggttgtattaatttttaacgtgtaataggcatagcgtaaaagttaccatttacactgggtatggtggttcccatctgtaatcccagcactttgggagactgaggcagatggatgagactagcctgggcatcatagtgagaccctgtctctataaaagaaaaaagttagccgggcgtgtgctggtggtcctagctactcaggaggctgaggtaggattgcttgaatccaggaaattgaggctatagtgagccacgattatgctactgcactccgggctgggcaacaaagcataattgtacagttcagtggcattcagtaaatacacattgttgagcagctgccaccatcaccgcccatctccagaactttatcttcccaaactgaaactccctctgttaaacaccagctccccattcttccccagcccctggcaaccaccttccaatttgtccctgaatgtgactgctctggataccccatacaagtgggtctgctattgcatatttgaccttttgtgactggcttctcttcacatgtcctcaagcatgtgtcagaattgccttctgttttttctttcttttttttttttttttttttttgacatggaatgtcactctgttgcccagactggagagcagtggcggaatctcagctcactgcaagctccgcctcccaggttcatgccattctcctgcctcagcctcccaagtagctgggactacaggcgcctgtcaccatgccgggctaattttttttttttttttaaagtagagacggggtttcaccgagtgagccaggatggtctctatctcctgacctcatgatccacctgccttggcctcccaaagtgctgggattacaggcgtgagccactgtgcccggcctgcaatttgctttttttaaacagggtctcactcctgcccaggctggagtgcagtggtgtgatcatggctcactacatccttgatctcctgggcgcaagtgatcctcccaccttagcctccagagtctctgggactacaggcatgcgccaccacacctggctaatttttggtgttttagagatggatctgtgttggccaggctagtctccaactcctggcctcaagcagtcctcccaccttagcctcccaaagtgctgagattacaggcaggagccaccacacccagaccggagttttcttttgaaggccgagttttccattgtgtgggtaggccacggtttgtttattcgtctattgatggacattgggttgcttctacattttcgctagtgtgaataatgctctgaacatgtgtgtgcaaatattcttctgtggttgctatctgttctttggggtatatacctagaaatggaattgctgcacatatggcaatgttgagtaaactttttttttatttattttttttttgagatggagtttcgctcttgttgcccaggctggagtacagtggcggaattttggctcactgcaaactctgcctcccatgttctcctgcctcagcctcctgagtagctgggattacaggcgcctggctaatttttgtatttttaggagagacggggtttctccatgttggtcaggctggtctcgaactcccgacctcaggtgatccacccacctcagcctcccaaagtgctgggattacaggcgtgaaccaccgcacccaactgaataaacattttgaagagctccatatgtctttacaagtggtgttcagcttagttcagctgctaggggcagtgttatactgaaataggttagtttggatgaatatccaggtgtctggatgtattaagaacgagagtccaggcagcccgtgccttgggcaggctctgagtcacagtgctgcttcctctgatgtgccccattcctatagtagttactggcagaaatggagttgccgaattgctaggacaagatcatcttgtgtgcgtctgccaggttaagtgctgtgtgctgtgtctggccaggtgctttcgttgaagtgttagagcccatgttcagccctcagccacctgcttcttgattggcacatcactgctattataacaaatcctgggagtatctctgagcagtttttaaagagttggaacaaggcattcagtgaatacatggagtggtaactactcctgggaaggggttgtctcacagcagccagatggccatgcattgatactgctagtacataaccagagtggtgcacgattcaaaccccacacagctgaatttgaggtacacagtagctgtttcttgtctgagccatgatcctgaaatagaacttggcagcaggaaagaacccagaaaatggattccacataaattcaaggaaaaccctgggtgcgtgttgtgcgcagtggctggaggcatcctgaagaacgagctcttactggcccagaatgtcatctcacatgcggaggcctgatttccgggagtggagtgctgaaaagcgctcagtcccagcagacagcccgtctccttactttatcactgcttctatccctttttaaaaagataataggccaggtgcggtggctcatgcctggaatcccagcactttgggaggccgaggccagcggatcacgaggtccagagattaagaccatcctggcaaacatggtgaaaccccatctctactaaaaatacaaaaaattagctgggtgtggtggtgcacgcctgtaatcccagctactccaggaggcttaggcaggagaatcgcttgaacctgggaggcggaggttgcagggagccaagattgcgccactacactccagcctggcaacagaccgagactctgtctcaaaaaacaaagtagaaataagaaagataataaggttgatagaagatattctgtaatgttgtgttcagtgtacccaataaaagtcccaagttggaggaacgggtaatagtgttttctgtttgcacagagggatggtactggaggtgggtgctgtctcctgcatgctgcttactgcttgagtgtatttgcacatggactgtgtcacatctgttttctgtgatacaatttaattcctgattctggtctccggtagctgtcaagatcaagaaaaataaggacaacgtgaagtttaaagttcgatgcagcagatacctttacaccctggtcatcactgacaaagagaaggcagagaaactgaagcagtccctgccccccggtgagtgagcctgaagtcacttcaggggcgggtggggtttggaaggttgctgtgtgtggccatgttgtatcttgttttgaatccctctcagatttcagagcccattttatggtctaagaatctgctcttgctgttgggagtgtgaggaatagttgtgattctcagattatatacagtaccagaaatcatttccttagccagaagagcggttagagctcatttaatcctgttcacgacccttcgaggttggtgctagtactgatagtccccattttttacaggggaacagatgaaatataatagaccaagtctttttatcgaatataatagaccaagtctttttatcaaacactaaatattttaaccgaaacttcgctggtggatctaatttctgaaccttgtgtgctctctttagcttaagtacaaaatttagacaagcagcagcaactcagatgtgtcttctggatggcttacttttgtctctttccctctaggtttggcagtgaaggaactgaaatgaaccagacacactgattggaactgtattatattaaaatactaaaaatcctaagtgtctttcgtctttgcggatgggaaagggaaaaatgctacctcgtagtggcttctgatgggaacaggacgcgggttctgttgctgccttcctgtgtctttttttttttttttttttctttctttgagacggagtcttgctctgtggctcatcctggagcacagtggtgcgatatcagctcactaccacctccgcctcctgggttcaagcgactgtcctgcctcagcctcccgagtggctgggattacaggcacacatcaccacgcctggccaatttttgtatttgtagtagagacagggtttcactgcctgcctcagcctcccatagtgctgggattacaggcatgagcctccgtgcccggtgcatccctaatcttgagcatgatctcagtcggcaaatgaggccatctgttttcagcctgtttgaaaataagatgtggggaggccatgatggaaatagcacgtggggttaaacataactggcagatgtgggagcgatggtggggcatgccattcaaacaggtcccaaaatgggtgcaacaaggtatagcacatctaccactcgctaacttgactgacttggagaaatgactacacttttgcctgtttcctcagttggaaaatagccatattaacacctctttcattggcttgctgtcagggtactgggatggggggaggtgcatgggttggggtggccaccaggtggtgctgtgccacagcgggcagcccctctggaaatgactggcatcataaaatctgtcttcatacccgaggtagtgttttttgtttttttaagatctctaccttttaaaagcgtggcatacagtgtgcttggtattgtgttaggcatttagacgtgctcaggttgtaaggttgaagtgccagtctttgaatattctgtaaggattgtgagggtgtgaggtggttttgagtctggtcacgggtcttgtttcctccgggagagggtgggtacaccagccctcaggcccaggtgcggcactgtgggcggctttcagcctttcccgttctgtaagcattgcagattcccaaggaaaagcgagcctttaccatgtgggttttctttgttcccagcacatcgtccagagtttcatcccagctcctaggagacaggccttgcaggggtgtgtccagccttgtctagagaaggccgcctttcatgcagtgcttcccagccctggcttgtgactcagtcatctggggcacttaggcagttcactgtggtggccagggctgactggagattgcgattgcggtggtctggggcataggtgtgtttccaagctctcaggtgggcctctgctttgctggggcttcagcaagcccttaagtgctgcataccaggtgaatggggaggggggaggtgatgggctacagctgctggtgtgccgactgtcctccaactccctgctgagtctgtgggaggtctgtctgttgtgcttcagctttttgacacctctctgggtcagcaggcctccggggaagcagctagaatggtcgctgtctggctgggtgcaggtgggctgacaggtttggatattccaggccgcattccggtggctgtggagatagccctgagggacagcctttgcagtttgtttcttccagtgccgtgtgcaggcctccagccttctggggctcccttgccccgggttcaaagtcagtcctcggtgaccacccactgcctaggaggcaggcccttcccacctggggggcctctgagggcaggggctgtaaaagcagctaccagaagagtccactttccccagcaactgcagggactgagtcagagaccaagaccttttaaaaggaggttttcacccaaagaagttccctcccctgccgcagtctccaagctgatcgcctggctcctgcagttctccggctccctgtcctgttctggaacttgcttgcttccccttccactggccttagtccctgatctcacagggtcctgttccttctgcacagaggcctcccccagcacccccctctttgactcccgatcatccttcagctcatgtcactgtcctttgggaaacaaccctgacgcccaccttccatcccctctccctacagcagggactctgacatttcacaaggcctgcaatcgctgtttgcaggatacaagtccacctcacctcgcctactaggctgtagacgccatgcaggcgggaacgtgtgttttatccattactgtatcctctagaacagagaacgtgctcaagaaaatttgttgaaagacaccccaatgagagaagaatggctgtttccagccttccgggcccctcagctttgggctcctgcagggccccagaaccgtgggatcacggccacgaggagaggccccgaggccaggacttcctctaatggacacagggcctttgagcaccgggtgactggggccccactccccagcagccatatgtgtttgcgagcgttttcagtcggtccgcatccacccggtcccttcagccagaaccctaggagccccgccccgtcctcccggggctcctttctcacccgcgtccctgccgcggtggatacgcacccctcaggctggctgcccagcgcggtttccacgcccaatctgccgcgaccccatcactccaccgcacctacccctgactcctgcttgtcctgcagcctgggctcctccctccgctggccaagtcacgccaagcagtttgcggttacaggacgggtgggggcctctgcatatgtgcagagtacggagggcccagggacgcgaggctccccgatgggcaacctcccctgcctttgcttttccccagagccccctcctggcctgcgttcggcatcttctcgggtcgtcatcgccctctgcggtgcctgcgctcggggtgagggtttttgtcggcttttgttacatcaccgatgtaacagtgcctggacgtagtaggtgctcaataaatatgttgttgaatgcgcttcagtctccccgaatgcttgtcccttccgggcgctctcatcgctctcctaccttccccgctacacagctcgaaggtcccctcctccgggaagctcaccctgtcccacttgccaggaagaatcaagcaaattttctgagtgagacaccttgtcctcactcaggcgtcctgcaggcggcttcagcgagttgttggggcagatgcgccgggagctcccgagggcagggacggcgtcttatttctctttttaagtccacagggcttgcacaatagatgcccaaaaaatgagagtgaatttagaatgagtgaccgagtggctgaagattgcctccttcctttcccagtctgtcggttacttaccctgtgacaagcccttgggacgggcagtcgcccctctctggcctatgactgctggctgcccccactgacaccttatacccttgatctgatcataaataagaagcagcccggggacctcgagactgaaactgatttagagacttctgggagcttttttcacttccctcctcccatccggccaggacagatccccgcccagaaaggggctgttgactgcagcgggctgcgcgcccagaactgggactgggatcgcggcggggcggggcgggcgcgggcccagggagaggcggggccgggggcggggcgggcacggggccccggccgggaggtgagcgcagctgtcgttcagcttgtgggtagcactcgggccgagccatgcaggcggcgcgcgtggactacatcgctccctggtgggtcgtgtggctgcacagcgtcccgcacgtcggcctgcgcctgcagcccgtgaacagcaccttcagccccggcgacgagagttaccaggaggtaagtttacgccgccccagaccgcagccacgcgcgccccaagtccccgcactaccccctctcccctcgagagcctgcactttcccacgtgcctctcagaccccttctctccccgcgcagccctttcccgtctcccctctccccttttcccccaccctcccaggcccgtggcccgcgtcccctcctgtctgggaacctgggggccgggaaaactgaagagatcagagtgaagcgagcgtggggaaggggaggaagggcgcaagaccgcctgcggggtgaggggctgaacgctgagcgggcagggcggcgcgggggaggggtaaggacaggggcattcgtctcggggtaatcctggcgcgcgaggtgcggggatgctgaggggtgccccgaagttttcgaccgtctgagattccaagatggggcgctctctttccggggctgagtggcctaggaaagtttggcagaaactgagtagagtctcccgagtcggtcttcgcagcacccctcctccccagccccggcctgcagggtgggagtctcagctggaaggctgcagggcttggggaagcggtgtgggtcacttcccctctagcgcagagaacccacagctgcttgcgcttgttccagggaaggaaggtggcctccgtcagcccatctcacactgttgtcctgaggacccccttgcattgacagtcagcttctctgtgtcccctggtcctagactggcccattcctgttcccccacgcccctctctctacctcacacctttaagccctgaatttctggcctagggcagtcactcccggcttccccgccctttccctactctgctgacccttggcaggattctgcaccccacaaacagggccagggctccccagacctccctgcccagacaaacaaagctgcagaatctcccagcccgtctcaggtctggtcacgcctgctctggccccgggagcccacctgtatcagttccttgtgttgggtcaaagattctggggccagtggaccaggatgaggtccatttattcagagccaggcgcccatctcaggactttggcccccggcggcctctccctgtgtcaagttctccagatatgggacagatcagggcaaagcagggcctcttggagggaatcctgatccagtgtgaggtgcccaagcgccagtgacagggagtctaataataacccctgacgacccggctgccatcaggcccaggcagatggtgcctgccctaccagagggaggggagcatcaggaccccttcctggggttcagtgggcactcaggagcaagacggcagtcggtggacccacccccctcccccagagcccagcctgtgggagtctgtgttccctgagaatgtggctgcctggggatagctccagggaatcttcctctcccagagaatgcatgaaaagaggcggatatgatttcagaaacagccgtgtgtgtgtgtgtgtgtgtgtgtgtgtgtgtgtccccatcccaaaccctgtgccccacatcccacacccggggtctccagccatagttttctcctctccactggaggaaatctaaacttttcattgggtcaagaagacccctaggtgggggtagggatggtaaggggactccctcaccctgatggccccagagacagttcctatcagcccaacagctgtggctggtggatcctgggcctgcccacagccccctcagtcccatgggcaggtggcagttgagccagatgaacctacctccagcctctgcccctcctcccaggattctggccccggctcactttgtgctgggcatcaaatggttccagagggtgtcccttcccatcggccactgctcctgggcagctgacaccagccctgcccactggctcctggtcccgctcaccccctcaccaccactcagatcgctgagtaggagatgagcgtggtgggccaggaccggaagtctggctctgggtgttatttaaggtggctcctgtttttggtaagttcccctgttgtgaccacaggtctctcctggatgtcttctttcctcctgagcaccagtcactaacagagtcaggtggaccgtcggtcatcccagtcttcagcaagcttgactggagcaagtgctatgccaggcgtggggtgaccgtggtaaccaaggcagcaggtcttcaggagaaattgctggggattttctgcggctgggctctgggcgcagtgctatggcagacaccaagcagtttgaggtggggctctgccctccagttggctggggtggattcccagttctttccatgtgtgaccacgggtaggtgtcttaacctctctgagccttgttcccttcatctgcaagaattagatgagatattccacatatcatgcctagtacagagagtcccatagcacataacaggagccagtgacacagatcattcaatggagtggctgagaggttcaggagtgtgtctcaggacagtaccctgctggggaatggagaggaaggagatctcttccacagactctgattgggggagactgaacaaaacgcctgcagaaagggcttcagctcatgccccacatgttcaaatgcacagtgctggctgtgtggggtgtggggggtgggtgcgtgtgcatcagagactaagcaaggatggaaacaggcaggtgctggccttaggatgtgggtggtgcgggggatctcaaaggcaagggggttcttggaagtgcagagatggtgaagagcaggtcacctggtgagctgggatttcctgagcaagttcagtgttccagaaccttcctgaggaagtaggggctctcactcactttctggggtgtttgggagccgtgaaagcccccagtcctcctgatagttgatcctcacccctctccccccagtgaacttgagcccaagtcctcgcaaaggccacttggcctgtgtcaccagccttgtggggaggctaccctccagtgagtagaggcatgagaggtgagcaccaaggcagggctgtggacgagggcaccttggccctggcgggcacccagctctgggctgccagatgtggctgtatgtctggaaggaaatcagcctagacctgcagcccaagtcttctcacctttgacagatgagggggattggatttggagacgattcctactctaaagagatgataaaagaactaatgagttcatggattatgaagcctgtggccagtgcctggcacactggaaactgctacaatcactgcttaggaaggagaagactgcagccagccggtgtccactgggcagtgttggggagaagggaatgggcacctggcactgaatccagcaatgtctctctgagcaaatgaacgaggcacttcggtgtccctgcctgagcgtgagtgccaccatcaccatccagccagcccctcaggggagaccagacactgatgagctcagttcttgaaacatcttagtaagctcccaaaggctgtgcaaatgttagttattgctactgtcaacaggcaggtggccacatgtgtgcttcctgttccagcttcccttgcccaggatcagccgaccagctgctctttggggacatgtgttaggaggcagaggagatgttgttaattttttttgtatttaggcatgtatttccacgtgttctctcattggttggttccgttcatagattcgccaaagtacaaagtggagggtacacagttggggactggaccggaactacaggacttcctgcttctgacctgggggcaggtctgaggaagaaggaccaggcagcaagcccatcccagccgagatctgagaagagctgaggttgggatgaggaagccccattcatccagtgtgaaattgagtcacggtcatcagacagtcatgccgcgcctgggagagggcttaatctttcccagtgggcctgggagggagactctccctctaggtgctcctagtttccctctcccagcctccccctgagaccggcacacctctctctatgtcttctggggccagggctgttgccccctcccctgcccagtgcagaagccccttgggtcccgctgccatggtcactgcggcccccaacttgggtcccagcttggcactctccgctctgggtttttcatgacacagtgacaaatcagaaataattgaagtccctttgatgaggggagaggcagagtctgagcaccagtgtgggagctgggggcctggtgttgctgtgggacaaggaggtggctgcagggcacagtgggaggcgtggggaggcgtgggaaattgtcttggcaaagctctgtccatctgagcaggggggcctggaagcagaactcttggctccctcctccattcccctccacctccatgcacatggggacatgcagtgttaattaggagcaagaaaataattgcccattaggagcagcaggtgccaccaagctggccctggaagagggtgctgctggttagggggaggggggtgggctcctacctgctcctcttttccctcctccttcctcctcccttgcccaccttccctcttctttcttcttcccttcccaattccttttccccctacaccctctcaccctgtcccacccaccacccccagttttttcccagcacctaggtagggttcccaggagggtttgggaagtaactccctaacaaaaggcttccaaaggctgggcagggtggctcatgcctgtaatcccagcagtttgggaggccaaggaaggaggatcacatgagcccaggagttgaagactagcctggccaacatagtgagagcctgtctgtatttttttttaaaaaaaggaaatcaaaaaaaaaaaaaaatgcctccgagtttgggtttctcaggcctcgctttcactggagctggacagcattatcagaaacctaattgaggccagctgcccagcttggagaggccccaggccacaggggctcagcggctgccgaagggggagaccgggaggctggaggaggcttgagagagtgaaacgggggagcaggctacatcacccacagcctgatccttctcggacgagccttccttgctgggtggggacattggtagattcaggagcttttcccactggggataaaatgatagtgggactgttcaggaggcaaactcaaagggtagctgggggcaggctggatggtaactgggcttcaggctacacaggtttgtctggggctcccttacatttttgtgttattaggaataacttggttgggcgtcgtggctcacgcccgtaatcccagcactttggggagccgaggcaggtggatcacttgaggtcaggagttcgagaccagcctggtccttttgtagtaaaagtacaaaaaaattagctgagcatggtggcacatgcctgtaatcccagctactcaggaggctgaggcaggagaatcacttgaacctgggaggcggaggttatagtcagccgagatcacgctgctgcactccagcctggtgagagagcaagactccgtctcaaaaaaaaaaaaagtacaaaaaaattagctgggcctggtagcacatgcctgtaatcccagatactcaggaggctgaggcaggagaatcccttgcacctgggaggcggaggttgcagtgagccgagattgtaccactgcactccagcctggcgacagagcaagactccgtgtcaaaaaaaaaaaaaaaagaataacttacaggaaagagtgcagtcttaagtgtgcagttcagttcaatgaatttataccctcgagcacctgcgtgcgtggtatgtgtgtgtgtgagcaacaccatcccaatcagatcgtattcctgaccccctagaagcccccttcgtgctctcttgaaatccgcaccctcccaaaggtagcaatgattcggtgattcacatttctctggctactcatgagtatctctgactttgaacttcatataaattaatccatacagttctctgctgttccatgtctggctttctctctcaacctgacttctgggaaattcatcccagaaataccgtcatgtgtggctggtttccttttcatggctgtatagtattctaagactataacacatgttctatatcttttctcttgttggtggacgtttgtgtctttttgggtgtaggctgtgactgctgtgtgaagctgctgtgaacatttgtgtatcttctgagggacacagccctcctttctgtaaagcagaattgctgggtcatggcatgcatgttacacaatgatttgcaatttttttttttttttggcttggttggggttttttttgggaggttgggttactttttttttaagaaatgggatctcagcatgttgcctagcccaggctagactcaaactcctgggctcaagtgatcctcccatcccagcatccccagtagctgggattgcaagtgcatgccaccaggcctcgctggtttgcaaatgattaagaggatccctgggctttagcagagaggcctcaggggctgccaaggggcggccaggacagaacgtggcatttctatccactcctcactcagatggagctctgtgttgcagggctctgctaagcaagtcagtttgaagaaaaagttaagctactggaaaaagtttgagaacttctgttgacactaatccagtgctgcccagactttaatggaatatatgttgcctgggatcatctctagaggcaggtctgattcactagctccagggcggggctagagattctgcacctctaacaagctcccagaagatgtcagggccacaggtcacagggtggtaaactttacttcaaggaaagaggctctcaactcccagctgtcttggcctcctctgcctgggcctgggctgcagggccctctggtgaaggggcatggactgaggaccagaagaggggcagtgactttccaccatctctttctatccctgggcttgctggggtcagtcccggggacaggccatgctaatgagtggtccaggtggggagagccccagccccagccccctgccacactgtgaggtctttgggagagggaggtgcccagatctactgggccctggcttcccagctgccactttttttttttttctagaagggatctccctctgtcacccaggccggagtgcagtggtgcaatcatggttcactgcagcctcaacctcccagtctcaagcgatcttcccacctcagcctcctgagtagctgagactacaggcagatgccaccatgcccagctaattttttattttttatttttttgtagagacagggtctccctgtattgcccagactggtcctgaactcctgggctcgagcaatcctctcaccttggcctcccaaagtgctgggatataggcgtgagccaccacacctggcggaaagccacattttccaaagtcaaatccatctgttcccctcccaagtgagccatctctcctgcctttttctgggctgcccccatcacttcagctgagaagtctgtcagccaagagtgaccagcagagcagtccatgtcagaggcccgaagacctgcccgcatctcacagggctggcagcgtggcctccagcaggtgtctgtccccctggaaaatggccccaaagccccagactgcagagcccggccttggtttgtcaggtctatctctgtgtgtgcctgtccctgcacaagtctcgtctcccccttagaccgcagggtcctggagtacccccttcctgctgattgccaccccctgcataggactccctgaaacaggctttccccagcagcacccccagagcactagggattcgggactgggaacccctattgggggtgcatgggaagcaggggcggctgtcagctcaggagcctgacttagagccaggtccagccctggctggcggccgccaatcccggtgccatctggtgcctatctggcaaaatcaagagatgaatgagcagagagtggcaccaggcctcctgacagactggctcccattgcagggccccgaggtgctaggcaggcctcaggcccctccggccccctcagaattctggctttgctgctgcctctggcactggaggttcagctgtccctggtggggtgcagtggaagggactccagaagttgcatatcctgactatcccgccccctcacacatcccccaagcatggagctggcttctcgattctcaggatggaccccaacacctagaacaagctcttcacattctggtagaggatgatgcccagcctgggacagcggggtccttgcatggaagaggcaacagatacacagggctgtccttccaggccctgcctcagtggcactcagcgcccgaggcctctgggtactctggtcttggacggtatccctctccttgcctttttcccttggccatggagctcaccacccacagccctccctgctagctggggattcctgccttgtctcctgagtggctcggactcttcatcagcagggcctggtccgtatcttcatccagggtctgaaccagaaaccggagaccagctctggcacccctccctcactgaccacgaggcccaccacttggcctcatgccctgtaagctccatcactcccacccaagtgcctcagcgccgggccctctgtttacagagtaggagcttgaaccctaggtggagcttggaaggatggacgagagatgcagctcaggcagtggggcactcagggcccaagggcagggcacttccagagccccgcactgcagggatgaagagtgacaacaggcctctgctctcttccagtcgctgctgttcctggggctggtggccgccgtctgcctgggcctgaacctcatcttccttgtggcttacctggtctgtgcatgccactgccggcgggacgatgcggtgcagaccaagcagcaccactcctgctgcatcacctggacggccgtggtggccgggctcatctgctggtgagtgtccctggacgctgggcttggggtgtgtgactcagtctgcaaggggccagggactgtttgaccatgttctgacggagctccagctaccttgatggaaaagcttgtccccagatgaatgttgtccctttttttttttttaccaagcatcaggaatcagatgcctggggtggtgatggggtctccagaaaggtctcccaagtggccccccacaaaccctgccccaatgtgggtttgtcctgtgcccagcagctgtgcaggcagcatttctgcaccgacactgggcatctccagtctctgtccctggcccctgccagctgctgccctgggtctgtgaggtcagaagaaagtttgactccagcacaaatcaattccatcttcttgtgagatcaatagcttttagtgccgttagccagttctttggtttggatgaggaagggagaatttcttttatttatttattttaaagatggggtctcactctgttacccaggctagagtgcagtggtgcgatcacagctcactgcagccacaaactcctaggcttaagcaatcctcccacctcagcctcccaagtggctgggactacaggtgcacaccaccatgcctgcctggctttttttttggggggcggggggtgggcggggaagagacaggctttcatcaagttccccaggctgatctcaaactgctgagctcaagtgatccacctgcctcagcctccaaaagtgctgggattacaggcgtgaggcactacacctgggctgagactatgttgctcaggctggtcttcaacttctggcctcagacattgctcccccctcagcttcccaaagcactgggattacaggcatgagccaccatgctgggccttaaagtgaggatttataactcccgtgcaggagtccatacccagcccaccacactgcctggccactccaccccagctggcgtccacatgcatgctggctgttttcaggagttgttgcgtttttcttgtttttaaatctataatgatttttccaaaagcctctagtgtccacgcagagacgcttctggggtgtggtcaccccagagagtagagtctcccactacctggcagcaggctggcagccaggcaggtcctggtcagcctgggggtgaggatgcctgggctctcatacccaggcagctcaccttgccactgcgagtttcttctctgttggaagatgttcttgatctcgtcctgcctgtagtgggaggctcacctaagccaaaacgcaggcgagacgctaaagcagccttgtggggcggacaaagctctgagcacaaggaaggggaccaaggctgctgcaatacatggccggggctgaaataagagactcagaggacagagttctggacaggccgggaggtcacagtcgagtgcggttcccagtacagtggaagagctttgagaagtgactggtgttaaaaatcctcctgcatggccgggcgcggtgactcatgcctgtaatcccagcactttgggaggccaaggcgggtggatcgcctgagctcaggagttcgagatcaccttgggcaatgtagtgagacctcacctctacaaaaatgagccaggcatggtagtgcatgcttgtagtcctgactgaggcaggaggatgatgagcccaggaggcagaggctacagtgagccatgatcgctccatcgcactctagcctgggtgatgtgagaccctgtctcttacacacacacacacacacagatacacacatacatgcacacacacagatacccacacgacaaacttgttttggaagaatactttggaacagtaagaatggcatgaggagtcaattcttctaatatggaagaattatctgcagtgtagggaaaactcaaggtggaaggaatgtgcgtggcagaatccatcccacaacattctgggcgtgacttgtaccaggcaagagggcaccagcagtaagaaaacaggcaccaagtctgctttcatgatctgtcagcagaggctgagaactgtgtaccagtttgctttgaatcattgcaactaaagagagagggctgggcgtggtggctcacgcctataatcccagcactttgggaggccaaggtgggtggatcacttgaggtcaggagttcgacaccagcctgaccaacatggtgaaaccctgtctctactaaaaatacaaaattagctgggcgtggtggcgagtgcctgtaacctcagctacttgggaggctgaggcaggagtatcatttgaacccgggaggcaggggttgcagtgagccgagattgcgccattgcattctagcctgggctacagagtcagactccgtctcaaaaaaaaaaaaaacaaccaaaaaactaaggagagagctctgaaggaaaggagcaggcatagaagtggatggcccacctgagtccaggcgttcctgggtgacatgggcacccaaacccataggatgagaaggcgttaacttggcaaaggtgggggcaggggaggcggagacacctccaggcagagggaagaggaacgtgcaaaggcccagaggcaggagcgagcatggggctaaaggaagccaatgtggccagagcagagggagcagatgagggggttgggggcactgtcgagggtcggggtgagcaatgagtggcagtgggatggggaaagtgtcacggggtcagaagacacagggggcagatgggattcaaaccatgaagcaactcataggctttgtgaggggtcggggtctttattctaagagccaggggagccactgcaggggctctgcaaagaggtagcgtgacccgataactcaagttgaatgtaacccaggccggcgggagtattcggaacagtgggacttgaatgtgaagaagtggccaccgggtgaccgaagagctcagaggcctaatgagggcagtgagcgaccttgggattagcaatagcaggagccaccaccacctgcaggccagagggacacagggagaggctatgtcaccagggaagctggagccacacagcctgcctatcagcggctgcagaacgaggggagcagggccctggctgccttaccaccacctccagtctcctaccagcacctccatcggcagaagccagctggcaggggagcccgagacattccgtgtgagggatcaacccctgtaatggagaacagggcaggggacagaggagggacaggtccaggcagagggtcgcatagatgcgggcaagagtaaaatcaggccatcagggaggcccagctggagagcagcgggcttacacctgggcgtgggcagtgaccagaggggagtgcccagaggaagagtcagctagggaggtttggggaggagctgctgaagttcatctgcaggtttctggcttaagcccccggatggggtggcagtgctatcctccaaggcaagggacattggcagggaaccgggaagagaagcagacagtcagtttggttgtacacagattgagtttaaggtgcctttgaaccatccaagtgcagttggagttataaagccagggtcatgagggtggccagtgtggaagtcacacacatgggtgacctgccataggaagcacagagtgagaagagaagggggctggggccaagcctggaggaagcacagtgtttaacagctaggacgcaaaaggtgcctgtgaaggagaccaggaaagagtgtcccacaaggaagggctgggaatgccacaagggcacaggagtcactgggcagcgtgttccaggaagaggaaccaagctgaccactgcacgtgggaggggggttgggaaaaacccttgggttaagtgggaggtcattggtcgccttccttggagctgcgtccactgggacacaggaacagccagattggtgtgagttatgggaggggcaggaaggagagtcgggacagcagcaggagaagggatggaggtaaaggttggggcactgaggtgggaggacacatgagctctgctgatgtgattccacctgaaagcgggggattgaatccgcagaagaaaagaccaacaaggggttcctgaaaaagcaaaagggataggaggatatacctctttgttctcctctattatgggggaagggtagtgattttatatttgggaaagagtagtgtgaacacaccagggggaaagcaacaccaccaactcgcttattctccctcaagcagaacagtttttcctatggcccaggtgggatcaatgaccccaggagagaccaggagaacctcattaaacagccaaggcgatttttctttctttcctttcttttctcttcctttcctttcctttttcctttcctttcctttttgacagagtctcactctgtcgcccaggctggagtgcagtggcacgatctcagctcactgcaacctctgcctcccaggttcaagagattctcctgcctcagcctcctgagtagctgggattacaggcactcgccaccatgccccgctaatttttttatttttagtagagatggggttttgccatgttggccaggctggtctcaaactcttgacctcaggtgatctgcctgcctcagcctcccaaagtgctgggattacaggcttgagccccaaggcgatttctgatccccaaagatgaggtgtaatttcacagcccctcctggcccatcgctgataaacccacagggcccgagagaatagaaggatgggaaaatgctggcttcatattgaatccctggaaaacactaaatcgtgactcagagagctagaaaaggatgaacacaaggagtcgacaaaagggcttctcagagcacaatacaattggttcattttcttttaaataaagttacaaattggagggtcacgggaagacaattcatttaatgtataaatatctcagctgagcacttggtgaagctcctcccctctgtgtggatacagttgcattttctatgatggtgcatttaactgggttcaaagctagttacacaactctggttgaacccaatgaatattgacttatgcagtggatttctaaactgtagagggggtgtgtgtaagagagagacagagatacgtaaagcatgcaggaaccttgtttttttttttgttttttttttaatgtctcctgcccccccatcttggatgatacaggaacctcattttaaaaggcacattcccagaccacactgatggaatgggccgggctgcttatctgcacttaacaggctccccaggtgattctgttcccgtggtctgaggaccacatcctgaaaaacactaaattaggagttgagggcgccctggaaggaggtttcttttcttttctttcttttttttttttttttttgagatagagtcttgctctgtctcccaggctggagtgaaatggtgcaatcgttgctccctgcaacctcctcctcctgggttctagcgattctcctgcctcagtctcccgagtagctgggattacaggcatgcgccaccacgcccagctaatttttgcatttttagtagagatggggtttcgccatgttggccaggctggtcttgaactcctgacctcagatgatctgcctgcctcagcctcccaaagtgctaggattacaggcatgagccactgcgcctggtaggaggtttctatcacagtcctccagggggttccgtcctagatcctgtgttgtttaaagaacaacagaacaaatataagtgtggacgtgtacattcatctccccccaccccaacccaaatgagcattttggatgaaaactcaggaggctgcttaatcaatcttcagatggtctcaagtggtgcaggtcagatggaatatgatggatgacaagagtcaagatttgaaatgatttgttcatgctggaatgttggactaaaaccaactagatgagatttcacagggatagatttaaagttctgcttttggttaaaacaacacaaaaatcaatacagcactataggaaggaggagagactgggcttaacagcaattcttgggaagaaattcaggggctgtttgtagaccacaagatcagtggggggcggggggaaccagggcgggtgcaagttcaggtcagtgccctgggaagtggaggacctaaggcatgacccctgctgcgctcagagctgatgaacaacctggacttgagtgactcactcaggccacatttaagagtgacattaaccaattagactttcatttggaggacagtgatggcatgggcaagggtctgaaaccttagtcccaagaaggacacctgcccacttggagagcatgaggtgagagggttatgaggaagccaggttcagctgtctgatggggcacggtgcagaactggaaacttcttccaggctgccctagaagacaaatgaagatccagggggtgagtggtttaaggaggcaggtgtcagctcagtagaagaaggaacattctataagttgggagttcacagtggaagaacagactgtgacatgggtggcctgaggatgttgggggaaagggtggaggatgtcgagagagtccacaattcctggaggtgtcaagagagacccaaggttggcaatgagtatgtgatctcagtagacctcagcgattcccaggcccacctgtgtcagaatcccctgggggctggtaaaagtgcaggtaacctaggccctccccagatctactgcatcagcatcccttgggctggctacagtctcccaacttttggagtcttaggactagaggacagtattttcctattgcccaaataaaatgtcctgtagaaccagcctgccagggaccctgaaccttcacctccccacccccagccccacctgccagaatgtgagatgtcatccacctactcaccgcagcccccaggaaagagttcctcagctcaagtcaaaaacctgctctccatagatgttcacagcagctgtattcagaattgccagaacttggaagcaacgaagatgtctttaacaggtgaatggataagctgtggtccatccagacaatgaaatattattcagcactgaaaaaaatgagttttcaagctggaataagtcatggaagaatcttaaatccatattactaagcgaaagaagccagtccgaaaatgctccacactgtatcgtttcaactctatgacattctgaaaaaggcaaaactaaggagaaagtgaaaaggtcaagggttaaggccaggtgcagtggctcacgcctgtaatcccagcactttgggaggccaaggcaggtggatcacctgaggtcaggagttcaagaccagcctggccaacatggtgaaacctcctttctactaataatacaaaaattagccaggcgtggtggcggacacctgtaatctcagctactcaggaggctgaggcaggagaatcacttaaacccaggagtcgggggttacagtgagctgagatagcgccattgcactccagcctgggcaacagagcgaaactctgtctcaaaaaaataaaaataaaaataaaggggttagaggggagggggtacttaatgggcagagcacagaggaattttagggcagtgaaactaccctgtatgatatggtaatggtggacacgtcattttttcatttttttttttaatttttgcagagatagggtctcactacgttgcgcaggctggtctccaactcctgggctcaagcgacctatccgcctcagcctcccaaagtgttgggatcacaggcgtgagccaccacacccagccaacacatgtcattatccatatgtccaaacctatagaatgtgcaacgctgagaatgaaccctagtggaagctgtgggctctgggtgatgatgtgtgcatctgggctcatcagttgtaatggatgtaccactctggtgcagggttttagggtggagtaagaggctgtgcgtgtgtggggcagcagatatatgggaactctctactgtccacttaattttgctgtgaacctaaaactgctctaaaaacaagcttttttttttttttggagacagagtctagctctgtcacccaggagggagtgcagtgccatgatcttggctcactgcaacctccacctcctgggttcaagcaattctatgcctcaactcaacctcctgagtagctgggattacaggcatgagccaccgcacccaaccctaagcttattttttaatataagcaaacattctcctctgtgtatcacctctaacctctgtttgggatcttgcttatagtgctgcggtgggcgttggtttctatggaaacagcgagaccaacgatggggcgtaccagctgatgtactccttggacgatgccaaccacaccttctctgggatcgatgctctggtaaggctcccgggcagctggccgggtacaggcacagcccacaaggtcagcgtggtcagagcaagggcccccgtcagatcccagctagctcagctgcacacggaggggctgtgtgacgcctgagggctggacccccgcctgcgctgcagttgcctctgctggggcaaatgggcaattgtgcgttccaagcctgcaggggtggcagggatgggggtgaggactaaaggaggcagctgtgggatcaaaccccattttccaacaagccgaacactttctgatttgtcaaaggagaccttgaacatggaaaatcagccccactgcattttttgttttcattttaagtgctgcatatggagtattgcaaggtccaggagatgccaagaggaaaaaactctcttcagagacaactgagggctgggcgtggtggctcactcctgtcttcccagcactttgagggaggccaaggcatgtggagctcaggagtttgagaccagcctgggcaacatggcaaaaccctgtctgtaccaaaaatacaaaaattagccagttgtggtgtggttccagctacttgggaggctgaggcagggagatcacttgagcctgggaagcggaggttgcagtgagccaagatcacgccaccacactccagcctgggcaacagaatgagactccatctcaaaaattaaagaaaaaaaaaaaattgaagagccccgtgatgtaaggtagtggagacctgccccagctcctcggagctctggcttccaggcagtgactccaggtgggggctcacagtgaaggatgctctggcctggccagaggaggtgtcagactcttaggggaaggggaaggctactctgccaagccagggctggattttgtggcagacgctgcctgatacacacgagccttttgctggggctgccacccctctgctggggacctggcccagggaggagcacgacaagggtggacatctgaggacttggttccctgaaaactgcctctgccttttctaccccagctgcctggaattggagttttcccacagtttgaccttggcccccacacacgtcattctcactctaagcaccagaccttttcagctgcttatccgagcagcctctgccacaaaatccagccccaacaggagaatttggccattgccccggcatcctccagaagaggattggaccccatttgcccccctcctgctcccttaagctcctctaaggctttaatccctcagtcaacaaggggggtcgggggtgtcaccttaaagagacagctgtgctgctcctccgtgcccaagtcaattgtgggaggaggccctggcctccagaaaggggctgagggtggctacaaaaccaggggccctggtcctttgcagagttcattccaccgcccgtgtccactgggacccatccccttagctgagcgctgagtcccagtgcggagatgctagtctggaacagccttgcgcggtgagctggggcggctgggttggaggagctgagggacagccagctcaggcctgggaggcagaggtgtggcctgcctggggagaactctccctctgggcacccacccttgccccaggccctggtggggaagggccccatggtcactgccctctaggctctctctgcccctccctgccatcctgctgcctgcctcctcttcacccaccagcaccaggatcactggaggaggaacctagccccgagaggaaaatcccctgccctgcccaggaaggcaccagggccatgaccttcacgggtttagagaaactcccagaactcccttatgggaaaacatcaagtcctagaagtccctatcccacaggacgagagctgccagggaggggagctggaacgggcccccaggctggggcctcccaccccatggcctgatggtgctccagggccaggtttggacatttcacagcaggttccactctctgaaatccctgctccagggccaggtttggacatttcacagcaggccccactctctgaaatcccctgtgttcccaaagagaagggttctgtatccctggagatcagcccctcgtcctctccgttgttaccgagaagtgaggtcaggagtcccagggcttcacactggtccagccagcccatagctgcctccagcctgtgggtggtcacctccccctctggcgtgaacccctagggcccaggtgtagctgctgccttgcctccaggtggaaaggtggcactgggtccttactaggacctgtgaggctggtttgggcctcagagtggacacccagcacaccagtcctcagggctccaggggaggcagcagatcttagaagacttcccagatccaaggggagaagtccggatatcagataaatgactagtgagataatgtcagtgaaagtgctggtagactgtaaagtacactcagctgtatgactgtgattatgagtgctattaattactgtaatcaccttggggtcagcgggaggctgggatccaggacgctgtgggcggcagaggcagatgggggactcgtcgacaggtcaggcaggacctggatctgggccttgccagaggccagatcatgcagctgagtggccaacaagaagccctctagggatgcacccacagagtggggtgggccctgctccaagtcctcctttcctggactggaagccccatacctatgcacgtccaactagagggacacctgtgccttggtgggtaggggcggtggttcagggatcaggcggtcctgggagggctgcacgccccagtctaggggagtagagaggagtcgttttgggataccaaaacttcctgtacctggtagccagcacggcccctccaggctctctcatgtgagtctgcagcaggctgatgggcagccctcagatgtagaaactgaggcacagggaggttgcattgctgacccgaggttgaaaatgtgtatgtttcagagcagaaaccagaacccaggcctcctggtcttagccccttacctccactgacctggcccatccacacttccagataagctcactgagcgctggagagtcctccctcccagaagttttcatacttgagcttgcatcagaatcacctggaagggttggtaaacactgattgcagggccctgcccccagaggttccgcttcagcggtcctggggcagggctgagagcttttgcttttgtgagtgagttcccagggggtgcatcttacgcccctagtcccgggaccacacttgagaactgctctttcctctagaccgtggtctccgccacctgtagctcgtccctaagtctgcccagcctggaaaactgacctgtccctcctgttctcagagctttccgtgagagagagcctgattccatctctgggtcatcccacctgtccctgcggggagtattatgtcctgaaactttaaggaattggggatggtatagagaagtggggagttgtaagtaggtcactgctgtcattcttattttttaaaattttaggatcttttgagcctaggagttcaagaacagcctgggcagcatagcgagaccccatctcaaaaaaacaattttttagttttgtttcctgtgggaaaatatcaggaagaaagagaaggcatgacaaatacaaatactgccttctttttttttccccctaaggaggagtttaagaaatagagaagttaactgtgagagagtagaactgtgagggagaaaacaagtggcctcacagaaaaagtttacagataattttttaacagccctttactctgaagtttgtttgatttatagaaatatagaaatatagaaatgtcacctattactgggtttgttcagaatggcactattctttgatgatagtgccatttgtataaatgtttccaaagtggttgtacatttatcttattaaattgaacagccaagtgtactagcatgacatttagttactgaatgtacttttacatggtttggggtcttttcccctgtgcttcgggctgtcgaatctgcacatggtagagtgtctccgtactctggtatctcttagtccttaaccaactcgtaagaaccaagcataagccagaaaacggaacaagccgctgacactgaaaaaataaaacaaaatgaaacaaagagagccattctcttttctggaactaggaactcccagcgtagcgcagatgtaaaaggccacacagctgatgtgaagtccccataacacagagaacaccgttggcctccgagagtggaatctaatcggccttgctgatctcactgtgggaagtttctgcctcttcttctgtgtcgtttttatctcccagacccgtgggagctgaaggctgccgagtgtggattagtgcacactgccccactcccggcccgttgtgcttcttggtttagtgtgacagtttcagaacaacaaagccctttctccgctcgctgccagcaagggcgtgcttggggctgccaagctgcaccccggggttctgcaggcaccctgggtctgggctgtgggaaagtcccgctaaccagtacgagccctgcctgtgctcttcaaaagccagctagggttgaccacttggaccattagaaatggatgcacatggccgggcgtggtggctcatgcttgcaatcccagcattttgggaggccgaggtgggtggatcacttgaggccaggagctcgagagaccagcctggccaacatggtgaaactgtctccactaaaaatacaaaaattagccgggcatggtggtgcacacctgtagtcctagctacttgggagggaggctgaggcaggagaatcacttgaacccgggaggcggaggttgcagtgagccaagattgcaccactgcactccagcctgggtgacacagagcgagactccatctcaaaaaaaaaaaaaaaacaaaaaagagaaagaaagaaatggatgaacgggctactctggcacactgcctagagggtagccctgctctgcaaggagcagtacctttaaatataaataaataaataatgtttttaactggatggccagccgtcaactttctatttctgtcttgcattggcagatgtttccttcagggtccactcaaccccaggcccttagggctcagccaagggacaggagcctgtctgcccacccagcaggacacacatccaggggaggatgtgaatacaaggagaaggcgccggtttcctcctcctgcctcatgtccaggctcctcagagacaggatcgcagctgtttttgtttttgcaaagtcccattgtcctgccttcactcagcgttcaggacccggtgtgctgcggctagtgccacaacaaagcttttctcttatagaacaattagaaatcctattgtggggatacaaggtcaaggtagcaacatagagtctgtttctctaaaagagaatttgtaagccaaagtgctgaaagttttaagagaatcttcaaagaataatggattattttgttggtttctccatctgggtgtctctgtatatagtaaggtatagtaatgaatgcatacgtttattccagccctttacagcaggggccacgtggtgggcacacaggatagcctccttagtagagagcaacagaggctccagagggcagggatgtgcccacactcccagcgccagaggctagacctggcctcagcctgcaacacataatggtgtgctcctttggcgccagcattctctctctcggagcccagatcctgtttaaggccaggtcagggactgccccctggtttgagggacatgaggactgggtgggtagtggcggcctctgtcttcagtccttcctccaggggcacaggctcgagatcttcaggcctggggcagcatggtgtgttcattcatgcctaagcaggccaggccagctttttttttttttttttcgacacagagtatcactcttgtcgcccaggctggagtgcaatggtgcgatcttgactcattgcagactccgcctcccgggtccaagtgattgtcctgcctcaacctcccaagtagctaggactataggtacatgccaccacacctggctaatttttatatatttttttgtagagacagggtctcactgtgttgcccaggctggtctcaaactcctgggttcaagcaatccgcctgcctcagcctcccgaagtgctgggatgacaggcatgagcgtaattatcgcacctggccaggccaccttctgctgcctgcaaagacctcttccgggatgagaatcagaagctctacctccatggcttttgccccctgctcctccctaggtttccggaactacccagaagatgaaggtggacctagagcagcacctggcccggctcagtgagatctttgctgcccggggcgattacctgcagaccctgaagttcatacagcagatggcgggcagcgttgttgttcagctctcaggactgcccgtgtggagggaggtcaccatggagctgaccaagctatccgaccagactggctacgtggagtactacaggtgaaggaccggtgggaggcagagggaggggcagcagcggctacatcagctttgtttatccaaacctgcatgttgagctccaggtggagaagggccactggaaagtattttttttttgttttgtttttttaagacagagtcttgctctgttgcccaggctggagtgaagtggcacgatctcagctcactacaatctctacctccggggttcaagagattctcttgcctcagcctccctcccaagtagctgggactacaggtgtgtgccgccacgccagactaatttttgtatttttagtagagacagagtttcaccatgttggccaggctagtctctcgagctcctggcctcaagtgatccactggcctcagcctcccaaagtgctgggattacaggcgtgagccaccatgcccagcccaccagaaagtcttgataagccattggccaaaatcaggagaacatgggggcttacaggggccacgtggtgagcatgcaggatagcctccttaatagataggcagcagaggctacagaggacagggatgtgctcacactccccgcgccaaaggctggacctggcctcagcctcccgcacacggtggggtgcttctctgggactagcattcttcgtggctggtgcagggtggaaacgccacatgcttcataggttcctcgcctgccagagttcatgggacaggatttcttgtatccacagacacagccacagggttatggggggttgaggagatgagcacccggctaagggtgctaagaagttgccatcaggggaggctctgacctacaagtcattgtgctcccagggcctgggcctaagcgtggaggaggcacaagggaggaatgaggctgtgtccccagactcactttttttttctttctttttaagacagtatctcactctgtcacccaggctggagtgcagtggtgtgatcatggctcattgtagccttgaactcctgggctcaagtgatcctcccgcctcagcctcctgagtagctgggactacaggcatacaaccacacctggctagtttaaaaaaatttttttttgcagctgggactggtggctcacacctataatcccagcactttgggaggccaaggcaggcagatcgcctgaggtcgggagtccgagaccagcctgaccaacatggagaaaccctgtctctactaaaaaatacaaaattagctgggcgtggtggcgcatgcctgtaatcccagctacttgggaggctgaggcagcagaattgcttgaacccaggaggtggaggttgcagtgagccaagatcatgccatcacactccagcctcagcaacaagagggaaactccatctcaaaaaaaaaaaaaaaatttttttttagaaataggggtcttgctttgttgcccaggctggtctcaaactcctggcctcaagcaatcctcccacctcagcctcccaaagtccaaggattacagacatgagccaccatgcccagaccagcctcacttatgtagaacctgagtgatggggactgaggggcaccaccctcacttaggtgtacaaactcatgcccgtgtcatctgacctctggggctttgtttacatctcccctgcctccccatttgccaaatcccagcctagccagaggcactggacacaatcggcggagcagggacctgctgcccctctccaggtgcagggtccagcgaagtttgctccgtggaaagcacaggaaggaggcagcagccccagcctttggagggctcccggctgaatgatggcctgggcttgtgctcccagggcccgggcctagcatggaggaggcacgtggggaggggaagcatgagtcaggaggagcgagtgtcagttctttggatccctccccgcaccctccatttgttggctcctcttcaagccattgatgaacgtcagagcctttagctcagggttgcacaacttacttctgttttctggatttgtgtccccttgtgtcataaagccccactccaggaggtcactgctggactgagtccaggggcctctccccttcccaaaaataggaggtggcaggtccctgagcagagggagctcatgaagtccccagctctgggggtcctccccacaccttgcctccccagcccgtccagtccctgcatctccgccatgtcctggatgctctggattgaagggaccttggccccactccccagcagatggatgctcatgggcaaaagagcctccctcccaagggacagaaggaaactgccagctctaaggactgtctgtgacctcctgtggccccaaaacaggggtgtctgatgattctcctgatgcatgggccattcattgcctgagccttcgaaatcttatgtcaggcaggggcaggacccattttaacgtcactcttctctgagcacacctagcagaggactgtgtatgtttaagggcctcatgtgggcattttgttaatgacactgatggaattaagtcagaatttacatatcaaaggcggcttattgttaaggcgatggtattaaaatagtggaaggatggtgtcaactgcacatcagctatttcagcgtgggtgattgacaggaccccctgtgagtccatccccaactccccactgcttattcgggttgaggcagaagaggtttggctcatgctgtaatcccagcactttgggaggctgaggtgggtggatcacctgaggccagtaattcgagaccagcctgggcaacatggagaaacctcatctctactaaaaatacaaaaattagctggacgtggtggcgcacgcctgtagtcccagctacttgggaggctgaggcaggaaaattgcttgaacccaggaagcggaggctgcagtgagccgagattgcgccactgcactccagtcagggcaatagagtgagactctgtctcaaaaaaaaaaaaaaagcagaggtctagtccaaggttggcacctatggcgcctgaacatcagtgatattctaccccttctcctgtctttgcttccatctgtggcttctcctctcacctgagctgctctgcaaaaaaagccctcccctgaagggcccctgtctttgcttttgggatagtccttgagcataaccatgcagcaaagcagatatttcctagcatttttatacaaggcggggcgaagtattggaggagataaaaagccaaggggctcctctctttgagaggctacggttgagggaagagggagccggggtgggagtggctctggcaggcagagccgagttcttggttaggaatacatcccccagtcctcgcccagctcctctgggaaaacacatccgcctagaggagatgtttccaggaacccctgacaacatgaggcgtggaggcagggaaaatacattgaatcacagccacagagagtgggttagaagcacccctaactggatttcctgctgctctgcagagcggaggcgagtggtgagaagaaatctttaagtttgaaacatgaactgggtatttcgagaggtgccctgtagctggctgtgtcccttgcaggaagcttgatgtagacaatgtggaatttctgggccaggctctccccaccaggggccttggctttctaatctgtactaatctgtagaatgggatccagctcacacctatgatcccagcactttgggaggctgaggcaggaggatctcttgagtccaggagtttgagaccagcctggacaacatagacagacccggtatttataatacgtgtgtgtgtgtgtgtgtgtgtgtgtgtgtgtgtgcgtgtaaaaataagaatgtgatccaaacactagatggtttgcgaggttccttccagctctgagctaagtctaaggaaactggcttcttggtggcagcaggctctgcccactccccaaagcccccggctccattccggggaaccccagagacctagtgtgtgctgccccctgctcgtgcagagacaaggactttgattagtccccttcttttggcagtaagcctcaattcggggagtcagaaagaacctcccttggctgccaggcctccagcttgctccctcccctctctccctcggagcctctttgccactttctgccagctccagggcactccctgcccacgctccaaactccgtcttcccctttatgatgtcagtgaagcagaaaaccattgctggagaggagaggtcagcgactttacttggctcttgcagcaagagaaataatgatccaaatacttccctctttggggacggggaagcccctgtctctgtgcccgcccctcctctgtccactctcccgctggtgcccagcacagggtaaagggcatggctgccaggggagaccactgggccttgtgaggaccaccttggggacctgtgtggaagggaaaggaacgagggcactttgtttggggtcttctcagtgtccgttggcttaagatactttgattcttcagcctgttctctggagaagcaggagggcagggcctttgaagtccttggctgccttgccccatcaacctttatatttagcaagcacttaatccttcctctggccctgtgagatgaggggttccagctccctctacagatatggaaaccaaggtctcaaggggtgaagtggcttaccaaggtctcccagctggggtgtgactgcctttccccatcagtccagccctggggacaaaaaggccagaggaatgaagggcttggaggaggctggaggtctgcagggctgtaggtaccctgacctggactcccgggttccacactgagccctctgatggtcagaaacgagcccactcacctgggtatccctggtgccaagctcagtgcctggcacaaatgttgtttaaaaatgaacctgaagttttttgttgttgttgtttttgagatggagtctcactctgtggcccaggctggagtgcaatggcgccatctcagctcactgcaacctctgcctcctggtttcaagtgattctcctgcatcagcctcccgagtagctgggactacaggtgcccgccaccacacctggctaatttttgtatattttgtagagatgaggtttcaccacgttggccaggctggtctcgaactcctggcctcaagtgatctgcccgtcttggcctcccaaagtgctgggattacaggcgtgagccactgcgcctgtcctgaacctaaaagtcttaagttatggatcccatccagcaagggggcaagatgggaggccttggggagccaggctgagtgtttgtcaaagaggcaggcaccttaggggctgtgttagatctgtggctataaacatcaggccttggctggtctgatgctgtctgagagttctagaagcaaagggaagcagggtcctaggcgatgcctgctgggaggccgcagaaagacacttcagagctgtgctgtccagggtggtagccccagccatgtgtggctattgaaattaattaaaattaagtaaagtttaaaatgtatttcttcagttgcacaagccatatttcaagttctcggtagccacctgtgggtagtggcaaagaagagagtggacagcagggatttagaacagctcctccactggggaaagttctagtgcacagtgctggttttgacactcagcctagaggtgaaggcagggggtgtgaattgacagctttgtccaggcagcagtgggggtgcagctcccgaggcttcagcccacgcatgctgggtgcttgctggctctgggcagcatgtccatagtagagggtccagtgtgtcccagggctgccgtgcaggcctctcacgtggccagcaggtcagaagttccaccctgctgctcctgaccatccctgcccctctacccaggtggctctcctacctcctgctctttatcctggacctggtcatctgcctcattgcctgcctgggactggccaagcgctccaagtgtctcctggcctcgtgagtatccctacccgtggacctgggacaaagagctgggcaggatgccatcatcagagagagacgagggcctggccagctccagagtgtggggaaaatagccaggctgcctgaggccaccttctgccccgtcctcagcactcagcagaggagacagacagcagccaccaactcaccatctggtcaccaaacgagcaagcattaggctttcctccttctctgggcctgactctgttgagcagctaagaaacatgggtccgtgcatgaaagcctctggccgtcttagccaacactgcccccttagcctgtgctctcacgcctgggtctctttagcctcaaggacctgggctccatggtcctttcctagtagtgagcagggcccacgtcagggcagggactgaggctgcctttggatccattgcaagggtctgggggcagggtgggtggggtgatggctgagaggaaggggaccccgcctgccaacgttgtcgcctgcctctctcctaggatgctgtgctgtggggcactgagcctgctcctcagttgggcatccctggccgctgatggctctgcggcagtggtgagttgggggagggagtgggtggtgggtggtggttggtctgccaggacactctggtgtgtctccaagcagggccagcttccggtcccagctcctaacctagaatcccagaatctcagaaccaaagggacttgcgtcatctgaaccggcccctctcgttacagatggggaaacaggcccagagaaaggaaggggactgcccagggtcagagccaggataagacactcatgcttcatacccagagagaagcccccggctgcccaggcatgcttaggcttacacgtgcttaggcttaggcgtgcctgggtgaccagggcgcttctctctgggtgtgaagaactgaccgggtctcctgagaatgggtaggggtccaagcctcagactggggaatccctcccgcatcagaagctgctgctttgccagctccccaggccctgggactgtagaatgtggtgtctgacttgccttccatcccaatgtcccaggactcccgcggtctgaagcacacatgctgtatgtttctggatgtgatgtctcaaaatggcttaaaaaaaaaaagttgggggcttcctatgcgggtccacatgatctttaaaggacctaacactggcgctaagctgtgtgcatgaggctgttcattcactcagctgacattgtttgctgggtggcactcgatggtacaagttgcctggggttgcggaagccaagaggacgtgatgtttgctgttgacaaagttccagcctttggaagcaagactcataggcagatcactgcaaccccaggctttgatacagtggaggtgcagtgtgtgtgtgtgtgtgtgtgtgtgtgtttgtgtgtgtgtgttcatgcacatgcacgtgatagaagagaacacagtttaccaggggaattcaaggaacccctcactgattcaaagtccacagactaaccctgggacatgcatctgttctgccatagtgacctgaggcttgataggataagatgggggtggcttgtacaagaagctccctaaccacactcacacctcgtccagtgacttgggggctggccactagctctgggcgtggacacaatgccctcagggactctggcactgcctgacttagcaccttaggcagaggcttgtgcagaagggagaagagggggcattttctgtctttgcctcctgccaccccagtgcagtgaccacggaccaaggaatggtcgagaaaaggcccaagtcatgtttgaaagcatgcaggagctgggacggctgtaaacagtgccactgctggccagggtgatgcaggcagctgcctggcctccagcctctcctctggggccagggccacgcacagggaagctgcagggagcacacggcgaactcctccagggccccatcccgctttctgggcagcctctgccttctggaggcagcggtggcttccagcttgccgctgtgagctgccctgtggtggccgcccctcccagtgggggctcctccctctcaccaggcttcagtgttcacgaaaaccagaggccatttaatctcccagctgggcgccctggaatgcggggagctggggagaaaggccatttccctaattcctctagtcaggcccctgagtgcgagatggggagcaggcggtggagctgaatgggcttttgacgggctggagatgctgctgcattttaataggaagccgggtgaggaggagccaggagggcggggagggcggccggctgtcccggggttgttgtggagagcttttgtgtggcctcccaatgccaccctgctctctgaggcctgttttgacagccatggggccagaggattgacaaggcctcccttccccacccccgacccctacccctccctgtccctagaaaggactccatgaggacagagcactgccctggagatctgctctgggtgaggcagggagaggagggagcagcggagctccaagcttccaggccctggggccacccctcgtggtcagcactgcgagtcaggaggtgtctggggtgaggggctagagcaggcagagaggctgggaagccctggaagaaggaaggggaaggaaatgggttcagctgtgagggaggaggcaatggctgtcacaagtgctttggccaccgagcctggggacagagaacttcaggggattcctccagctaaggggcagccaggcctgcccctgagtcagagggtgggagtgtggcctctgcagccaccctgtctgggcccacatcctcccttcaccccttcccagcagtggaaacccaggaaagttcctgaggttttctgtgcctcagcttcctcctaggtgaacacagagaataacaggacttacctcaaagggctgttgctagggaaagatgagtgggttcatcctgggaggcacacagaaaatgtccaataaacagtggccaccactggcttcctgtgcattcatcgtcatcatgctagggtcacgggggtcccttcagacccacacctccattctcaggagctgcctgcaggctcagccatcacctgggctggttactgggcagcctctcccacctgccccaactatgctcagtgacctccttcctgtcccctctcctgccatccctatcaccatggcatgagtaatgcacacgtgtattagtccattttcacactgctgataaagacatacccaagactgggcaatttacaaaagaaagaggtttgattggactcacagttccacatggctgaggaagccccacaatcatggtggaaggcaaggaggagcaagtcacgtcttacatggatggcagcaggcaaagagagaggacgtatgcagggaaactcctgtttttaaaaccatcagatctgccaggtgtggtggctcacacctgtaatcccagcactttgggaggctgaggcagggggatcacctgaggtcaggagttcaaaaccagcctgaccaacatgccagaaccccatctctagtaaaaatacaaaattagccaggcatagtggtgcattcctataatctcagctactcgggagactgaggcaggaggattgcttgaacccgggaggtggacgttgcagtgagccaagatcacgccactgcactccagcctgggcgacagagtgagactctgtctcaaaaaaaaaaaaaaaaaaaaatcaggtcttgtgagacttattcattatcaaaagaacagcgtgagaaagacttgcccccgtgactcagttacctcccaccaggtccctcccataacatgtgggaattcaagatgagatctgggtggaccatttcgacatgcacacacacaagggcatcacacacatacatgcacacgcacacaggtgcttgtcttcattaataggagagttgactcctcactgagtcccacaccccaaaccatcctatgcacctatcccaggagatggaggctccagggtggccaaggggtgtgaagagcaggcctggcctgggaggggaaggaggagagaggcaggaggaagaccatgtcactgtggagccttggactggagcctcctgtccctctcctttcttggttcccaaacttcttgggggtgacccaaactgagatggtggcctcgctctttatttccccaaggcttccccatcctccacttgggcctggctgcactctctgtcactccagccagggggtgggggcacaccaccaggcctgctggcgccgcagctctgataggtaataataggccaggttgatgtattatgaatgctggtggtttgtgtataaagcatttctcccagggtcttaagtgcgtgcgtgcgtgcgtgcatgcgtgtgtgtgtgtgtgcgcgtgcgtgcatgtggggctctcgggaagctctgtatctggaggggtgtgttattccgcaccctcgctatacacacattttctagaccgtaagtgctgtgatgcactaacctctaggtgctagaaccctgcacggcactgagtaagtactccataaatgtctatcaacttagcaagttagtgagtgatgctctattgtggacccctgaggcagtggctcctgaaggaggacggggccaccggcagagcagggcactcagaggggtcccctgcccggggagcatgtgccagaggagggggacatccctaaggaacaggccagaggacctgagctctccctggctgctctggaaggcggaggccccccagtttatccagtccctagagcaccccaggccagatctggggtgcgcctggcttggaggccatgtccttgctgccgcctctcctggggcctgcgtctgctcccaccctgccgcatgggccttagcaatcacttagccaggccgtgctgtggggccaggtcctccagctcataagtggcagccgcctctcagctccatgcccttcccaccccatgtcttggcaggtgagcacctgcacccaaggctcacagatgcttcagcaccaacctcattctttagaaagagtttgggggaggcttcatagattgaacacccgtccctgtagcacttgatcatagcaagacaaaatgtaaaacagcagatgaggccatggtgtaacgaactcccacacacacagcctgcagctgccctggggcccaggatgctggcccccaaaggtctgtcccagaagaggcattcgggaataagagtaacagcatgcgctctgccccagtcacttttctgagcactttacttgcattgggtgaatagcattatcatctccatgtcacagatgaggcaaccggggcacaggaagaataagtaacttgtccaaggcaacagagctaggaaggggcagagccaggtttgaacccaggaggctggctccagactgtcctttgccacctgggagggagctcaaggggctggggtgatgggctcccggctcctcccagggccccgctgtcctgatacctgattttcctccaccccgtccctctctccctcactcaggccaccagtgacttctgtgtggctcctgacaccttcatcctgaacgtcacggagggccagatcagcacaggtaactacacactctcaggctgctgctgtggatgcataggtggccggactctgtgcccctacttacctctttcagccctgtagccatccaacccctcctcaaccctgaacttcaagtccagctcatgctctaggccatttcctagaaagtgcctcccttgggagctcagggacggggagggaggtctggcttggccaccaaggatgatagagatctcatctggtcatttgtgagctgcctaacgttatgccgttgccctgcagaggtgactcgctactacctgtattgcagccagagtggaagcagccccttccagcaggtatggccccccgaggcctgccctcaccctgcccacagccgctcccccttgaccctaagcctcaccactgaccaagatggcggaggtggcagggccttgcttgcctcactgtggtcctctccttagctgcttctgtgaggggggcgtgcttttggtcgtgggttctagattggtggttaacacatatgcagctcaatgcgggagctagttcccatgcagatgctgtccaggagctctggggtggggccgagattctgtactactcacaagctcccaggtgaggccagggctgctggtccaaagaccacatctgagctgcaagcagggagaagactgtgcagctctcaagaagccagaggagtagggggagacttcctgcaagtggaggggcctgtgcagctgcagccaggtgggggggtgggaggggcaggagcataggcccctcagccactgtggggctcctgggagacggagcctcactgtggggctcctgggagacggagcctcactgtggggctgtgtctttcctggctcagaccctgaccaccttccagcgcgcacttaccaccatgcagatccaggtcgcggggctgctgcagtttgccgtgcccctcttctccactgcagaggtaaggcagctgtgcaggaagaggggagccccagatgaaccctgacagccctttcccctgccccggccccagggccaggctgtgcacagcttgctgctggctctctgttctcccgcccccgtgactcggctccctcccttggctctagaggcccctgagcacagctgctgtggtggttttctccgccagctctcctccacagcccctcggcctctctcgctctcttcccgcttcaggaagacctgcttgcaatccagctcctgctgaactcctcagagtccagccttcaccagctgaccgccatggtggactgccgagggctgcacaaggtgcatggggaccctggggtcacgtggagagtgtgagggcacccagcaggccacaccttccagagaaaagccggtagaggccgaggggagcgatggcctgggtccccttccggcccaggaatggaactgaagccagataatgggaagggagggggtgcctggcttctccaggggctgagacagggagactcagtacaagggaccaggggttcgggatgggagggttggatgcggttggctctgggtcactgggggaccctgaacaatgcaagggaggctgttccccattgtccagactcctagccatttcctcaacacatctgtctccctgggttgcaagtggatgtcccaatcccattgccagagtcttctttccaggaacttggaatatcagacagacacaatgatgcagggaacacatggggagcacgtgagagccccccacccaaaagcagtgagccagtgtatggcgacagctttcacatcccagatggatttagtgcagacagtctttgtcatcatcacagctgtcagctccatgcttggccctgttctgtgcattttatatccagtatgtcattcagttctcacagttatactgtgaaccacacgttatttcctaggaaattgacttgcttgtgcgtgtgtatggatagatccatagatacagctatgtgtgtgtgcacgtgcgtgtgtctgtgtgtgtgtgcgtgtgtgtgcacttgtggtgtatatgtctgtgcgtgtgtggtgtgtttctgcggttgtgtgggtgcacatatgtgatgtgtgtatgtatgtgtgtggtatgtgcatgcttgtgcgcatgtgtgctgtgcatgcgtgtgtgtggtgcatgtgtatgtgcctgtatgtgtgtgtggggtgtgtggtgtgtgcgtgtgtgtggtgtgtgcatgtctgtgatgtgtgtggtgtgtgtgcatgtgtgttgtgtgcacatgtgtgcacatgtatgtggtgtgtgtggtgcatgtgtgtgtgcatgtggggggtgcatgtgtgtggggggtgtgtgtgcgtgtatttataaagtggcttactgaagagtcccgagttggcacatcaggggcttgggtttagatcctggtagtctgacctcagagctaagaacatggcagtcacccctgtctcctctcttcttccccttctacatctaatccccagcaagtcttggcagctctcctctcagctgtaccctgaatccatccatttctctttctctccatggcttccaccacgatccggtcctgcccctccagcagacagtggcctcttcccactttctcttgccccctcaccacccatgagctttcacacatgcaaccagagcagtccttttgcagactaggttggatcacatcccttccactcccacaccctccaatgtctttctgactccttttaaaagtccgtactcctctcccgcattgcaaggcccagcacgacccagcccctgctggcctatgttctctctctttcctgaacaggccaagcctgtcccctttgccccctcttctcaaggtgtgctgcttcttgccatcctggcctcagcttcagtgcccccgtctctggttccccaccctgcaacctcctccgccctgttcagagccagcttcttagtgcccagctcacagtaagtgctcagcaaatgtttccagcgtgaacccaagaagccccattgtgttaggctccagagtgtggacctttaatggtgctgcaaggcgctcgggatggggagcagccaggagaccccaggtccaggctcgggggagagggacttccagaggagagctcggcccgcaggctttgcccccgctccttcactagctgcatgtccctcctcttcctccaggattatctggacgctcttgctggcatctgctacgacggcctccagggcttgctgtaccttggcctcttctccttcctggccgccctcgccttctccaccatgatctgtgcagggccaagggcctggaagcacttcaccaccaggtgggctgcctagtaaggaggggagcctcccacagcctggagttctgggagagcagcagacaggggcctctgctctacgatttagctgataacccaggactgaggagggcagcagagggcccgggcattcagcccaacaggctggctgacttctacagaagcttccccaagagtccacacagaccctccaaaggagttcggtggggcccagagcaagagctggggcccagggtggtgacagccctcaggccacagtctggcctcccttctcctctcttctcaccaggactttgcgatctggaatgaggagagttcttggtgctgggaggggtgccccaggaatagcaagaaggatacatggggtcactgttttcagggagcctgcagtccccttgaggagatgggcagggacacatggtgtacaggcacctggtgagcggattaggcaagaggacgcagggtagtggggacccacatgcgcatggtcagcgtggtggggagcctggaagagctggtcgtgaagctgggaatgggccagaatgatctgcaggaggcaggctggggaccgcgttttagaggagtctcaaggagacacgcgtggccagagagtcctgggaggaaaggcagggaagtaggacaggacctggctgcctcggagcctccttcacccttcacagccggccatcttctacccattgttctagaaacagagactacgatgacattgatgatgatgacccctttaacccccaagcctggcgcatggcggctcacagtcccccgaggggacagcttcacagcttctgcagctacagcagtggcctgggaagtcagaccagcctgcagcccccggcccagaccatctccaacgcccctgtctccgagtacatgtacggcctgcacacacacccaggctgggtagcactgcccggacagcatgttgggtggggtccacagtgccgggtgtggggaggaaggcatccaaggccacccgtggtccccactacagccacagggtgcctggagggaaggcccccggggagcatctagtcacccctccacacccacatgtgctgggggaagaaaccactgatgtcagcagcctctgccacaagctggtgggacaggtctcaggcccaaaaagctgcatttctccaggccatgctgctcccagcctccgttgcccatcagccacttgtccccaggcttcccaaggtgctcttctccatatctgcccactgcaccccctccactctatctgtggtttggttccatcccccacctcccatgtgctcacccatgggaccctcctgtagaaatctacacacacccccactcccacaccatcccctcctgagctctcctctcatccccgcaggaaccaagccatgctctttggtaggaacccacgctacgagaacgtgccactaatcgggagagcctcccctccgcctacggtaattggggctctggcccttccttgttggggtaatacataaagacaaaacctcctgccaacccagtgaatcctgtccacaaaggcagaaaagaatgaaactgttctgttattgaatatgcactaaaccagaccgtcgtgggtatcccaggcagtccgctaaggagattgcaaagatgcaagaaatctcactccttcccctagccaggcaggaacaagacacagcccactgcatacctgtcatccagcaagaggacttgacggcactgtttgtcacagtagtccaccttaatccacttgctaattggggtggccatcctggttaagtaattgcctttatttatttatttatttattttttgaggcagaatctcactctattgcccaggctggggtgcagtggcgcaatatcggcttactgcaacccaggtttcaagcaattatcctgcctcagcctcccaagtaggtgggactacaggtgcgtgccacaacgccaggctaatttttgtatttttagtagagatggggtttctccatgatggccaggctggtctcaaacttctgacctcaggtgatccacccgcctcggcctcccaaagtgctgggattacaggcatgagccaccgcgcccggccagctaattgcctttatccagaggaaaaataaaactcctatttccgtgacaatcagatagctacaacttggagccaggcccctaagtgaactgtcactgagaaggagatgaggtgctgtcttcctgatgtttgtacttccaagagatggctcccagacctgaaaaaaccatacctggattgtaacactggcaagggccatattcagcctttaagaaggtttgcagacatctcaaaagacagaaattatttacaatgataagttttctaaaggaaatactgcaagaagagagggggtctctttccctttttgctccagagaaaattaaggaattttttttctttttagatttctgtttaccttaatccttggtctcttttgggctggacggtgggttggctgtggtggcgggtctgggagggctgaacccaaacacagccttcctcaatccgtctcagctccccatgtccctaggactgtgcccaagtagggccagtgcctcttgtccaccccaccacctccagccagagtacctgagatacagcctcaggggagtagctcagggtgggcaggttgagaaggaaagactatgctgtctcatcccagagaagtatccaaaggacacagaaatactggctgagacaaagaaagctgtaaacagacagtgaagtgaccgccaaggttcagggacacggactccagtgccaaaggcctgggttcaaatcccagctcatggcttatggcctctgtgactttggacaagcactttgctgctctgtgcctcagtttccccatctatagaatgagtatgggaatactagcacattcctcctcggtggtgtgtgcaatgggcaaattgattgttatcagagcgtacgtgcgaagcatccagtgagtgccgtaggacagtgagctgttatttgtgactttcttccaccccaccttctccacagagctgtggcatttatcaattttattttattttttattttttatttttttttgagacggagtctcactcttctgcccaggctggagtgcagtgatgtcatctcagctcactacaacctccacctcccaggttcaagtgattctcctgcctcagcctccctactagctgggattacaggcatgcaccaccacacctggctaatttttgtatttttagcagagacagggctggctggtcttgaactcctgacctcaggtgatccacccatcttggcctcccaaagtgctgggattacaggcatgagccaccgtgcccggccagagctgtggcatttataagaaaggacaaggggaatgaaaggccagaagtctgccatggggtgggcagaagggtcctggagccaggcatctcccttcattgggcctggcgaggcatttcagtgccccgacccagatagtttggaaggggacatccaacaggaaagcagaagcactggggcccaaatacctgggaccagcgtgatagacctgggccctgaggacccaggaagtgcacgcacaggcacccagggagtcagcttcccggtcatggcgcttggtgaaaatcatagtgtcagacccgagaaaagagcaagtggaacccagtccctgtcttcaggaagttccagtctatagaaggggcactcaagaaggctgcctgtagaaagtgctacaaggtactttgggaccagaaagaaggagccatctttgctgctgctctaggggattccagaaggttctatttaataggtggcgtttgagccacagtgtagagcaggggctcacccaggggcagttttcccccctggggacatttggcaatgtctggaggcattttcattaccacgcttggaggctggggatgggggctggatgctattgacatctagggagtggagcacccaccacaaagcacggtgcagccccaaatgcccataggttatggggcctgtcctctgcgtgtgggatgttcagcagcatccctggcctctacctgctagcaagcctgctggaaccaatccccctgtcattcactcctgtgccaccaccttggtgcttttgcctggagcacctcacctgctgtcccatcccacagctttacaaacacaagccccagcctcatgtcgttctttcttcctggggtccccgggagtgggctggttgaacctgtattcaaagtcagcaccatttattatttatgtttatttttttgagacagagtatcactctgtgacctaggctggagtacgtggtgcaatctcagctcactgcatcctccacctcctgagttcaagcaattctcatgcctcagcctcccaagtacttgggactataggcacgtgccatcacacccagctaatctttgcattttcagtagagacggggtttcgccatgcaggccaggctagtctctaactcctggcctcaagtgatgcacctgccttggcctcccaaagtgctggggttacaggcatgagccaccacgcccagcctaaaagtcagcaccttttaaatgccagcctagcttctctcactaatcagaagcctcccgggttcctttttccaaccaccagctgccgtggccccaggaatgcagattgactttaatattaatctaagcacaacgtaattaggggaaatctgctgtgaaaaaagaattactctatgcactgtgatgccaaataaaaatgattttcagattcccttctgtttgaaagatccaggccactcatcctgccgttagcagagataatcagcaactgaccttatttgcaaggctcaaggacagaaaacccttcctccctagatttaagacctgcccagaaacacttattgctttggccaagttgactgcccagtcccacctagcccagcctgccctgggaagacccttccacctccatgcccggtaagggacctagagagacatctaatgatgccgcagaccaaggaaccccacagcatggagggtgtgggtgtctgccccagtaaagacagcacagctggctgcgccccaccctccccggggcgcctgctctaaacactccttagcaccgagcaagttcgagaggtggataaactcctccctctgccgagcaccctctctgggacagtcaggggacctcactgggtgggtgatgtcacgcctggtgatcgggatatacagcctgtcccttgctggaaatgtttcttcccccagctctgccttcaaggaataatctctcctgtccttttaggcactgtttcttggacttgatgaacaaaaatgacccagggcagttaaagatactgacgttgagacttctcttcagacttacagaaacagaatatcttggggaaggagcctgggagattctaagtttaacaaacttattatcattcaagttgggaaatattgctttaagaaggagggtcttggccagcaccatgcctcatgcctgtaatcccagcactttgggaggccaaggcaggtggatcacttgaggccaggagctcgagaccagcctggtcaacatggtgaaaccccgtctctactaaaaatacaaaaattagctgggcatggtgatgggtgcctgtaatcccacctactcgggaggctgaggcaggagaatcacttgaacccaggaggcggaggttgtagtgagctgagattgcaccactgcactccagcctgggtgacagagtgagattctgtctcaaagaaaataaaaaagaagaaggagggtctcatacttgcgtatgcatcagaatcgcctgagggacccaccctgtttctgattcagaaaatctgagttggagcctggagatgtgccttttttgtttttttgagactgagtttcactcttgttgcccaggctggagtgcagtggcataatctcggctcactgcaacctccgctccccaggaccaagcgattctcctgcctcagcctcctgagtagctgagattacaggcccccaccaccacgcccagctgactttttgtatttttagtagagacagggtttcaccatgttggccaggctggtcttgaactcctgagctctggtgatccacctgtctcggcttcccaaagtgctgggattacaggtgtgagccaccgtgcctggccggagatgtgcgtgtctgacatattcctaggtaaagctgctgctgctgccctggaaaccacgcttggagaaccactgctctgaggccagcttcttcagcctcagtgctattgatgggcagcgtcattctcggtggggggttcctgtacattgtaggacgtctagcagcatccctggcatctacttgctacatgccagtggcagcccagtgcccagttgtgacaaccagaatatctccagacattgcctaatgcccctgggaggtaaaaacatccctggttgagacccactgggtcgaaaacctcatgctccctcctccccaaccccagcccaagtggaagcattccattccccctgatgtgaatggcctggacccctgaagcttcccgggtcaggagagtggcagtttctggaagcttgttagaagtgcagaatctcaggtcctgtggacaagatccccaggtagcctgtgtgcagggtatagagtgaaaggccctctccactgccaaggacgagtaactaagttctgtcaggcacctactctgtactgggtcatgctcctccaacttgaatgcacactggaattgcctaaagagctctaaaaacactgatagctctttaaattcattttatgttatgtgtgtggtctttgtttttttttaagagagagggtctcgctccgttgcccagggtgaagtgcagtggtgtgatcttagcttgctgcaacctccacctcttgggctcaagtaccttctcctcctgcctcagcctcccaagtggctgggactacaggtgcatgccaccatgcccagctaattttttgtatttttgatagagacaggattttgccattttgcccaggctggtctcgaactcctgggctcaaacgatcctcctgcctctgtctcctaaagtgctgggattacaggtatgaatcaccaccgttatgtgcattttgcatcaacaaaaatatacatatttatatactagtggatgtggcctgggcatcgggatgtttttaggctccccaggtgtttctggcgagcagcccagtttgagagcagctgtgttattaaggctcttccctgctccatatcatttcgccctttcaacgtaagagctgggtgctcttatgtccattttgcaggtagggaaactgaggctagaaaaggctggagaacctaagccaaggtcacggggtaagatgcacagctgggatttgaacctgcttctctgagtctctgggcctctgccctcagcctgctggctgctgactgctcctccgtgcgctggtggaccctgacgctgcccccagtgtgaggggacaggctggatgctgggggtgtgtgctggggcggagtggacattggaggacagctggtctgtgtgtgcattttttatttgaggctgggaggcagaagtcttgatggatgtggggtggaggcacggccgggtttccctctgacacccgacccagttccactctgagaagtccccggcacctttgctggtgcagtgcttggctgactcagctctgaccatcccctctcttctctcttggcagtactctcccagcatgagagccacctacctgtctgtggcggatgagcacctgaggcactacgggaatcagtttccagcctaacagactttcgggggttcctgcctcctttttccgttctggtttttaattagtgcaaatacaagctgcgtttctttaatagaaaccaaaggcatctggagcccgagaggcctcctgctgtggcagaggagcagctgggattcccgaccaaagccccagggggtgcagaagactcaccacgcgggccagcctctctcttttgccctgctctccacaccagaaatgcccccaggtgcttggctgcctcagaggtaccatccctgagctggctgcctggccctgctcacccctacgcctcgcccttgccaggaggggagtggcagtgaggagggggccaggtcaggcaccaccatcaagagagctgtgtgttctctctggtcccacaacgatgactctgcctcttgtcagcccagccaagagcccagacgacccctctgtcctcgttccctgtcctcgttccctgcaggtaacatgagaagggctgatcaggagatgctctttaagaagttcgcacccctgctgacaccagaacagcccaaatcagagttcccagggccagacaggctcttcctgggccacagaggggaggcatcaggaaagctctgcagtggggggctggtggctccggggctgggggatcacaggctggtgaaccccggtgggaacagaggtgaaagcctgccacattccgcctgtctccctaaccctccattgcctcgcctctattccagaatcaatgctgcagaatgtgttagctgcagataggcatggtctcaggtatgaacagacactttgaaacgactttaggtctttcttttctccagtgttttaaacatgttgattatccaaagaattgaaactcctagcacatccagtttttacaacagatttgcagctcattccttaccctggttaggtcactacttttgcagattttgctggcactgatctggagatctgcagatctggaggagacgggaaggagtcgattcttaaataaggatcagtgaggcatcctgtcccaagctactgtttggtggggatctgggttcatctcacccacagagggaggatctttaagaggagaaaaaagccaagagggaaagccagagttccctgttctaggggactagccaaatgcctacatcagctgtcccctccctgttgtctccaagtaagtttgccagaaaaggttttagcaaagtgctacaactgtgtctttataggaggataggcctctgccctgccccacccccaccacctgtccccacccagtgtcccaggccacaggagcttattggccaggagggaataatgtcccccaatactgcctgttgagggaccagagttggggtctttggtgcttccaacctcctgccaacctggagttcacaacaccagagccccacggcctcgcacactgaagcaggggcgtgcggtgactcggtgcttctgttttggaagaaccacctgtcatcaaaacatggacagcagggtgttctcagctcccagcgaagcctccacaacagaatggggccacagggcagccgggactccctgtctcacctacattaacccatgcatactgtatgccataaactcactttggtatatccgcgtcacatgcagagaggaactctgcgacgtcaaagtgttgcttcttaaagtttcattattggcaactagagggttgtttttaatgcatggaaactaaacagattcctcggggagttcctgaaggaaccaggtgggcaaacctttgcttatatacatgcggcctcacctggaagagaaataaaccacttgtactaaaatgtgcgttccgtttctgacttccacagctgcaggaaataacgagggtattgaaagatggagcgctcccctccggcagggtcatgtggtgggaggcttagaagcagattccagtcgcgatttccgtgccaggactgaaagaggggcttgaacgaatgtcatggtgctcttgcgtggcttccagctgctcttacaggaccagggacaggacttatttctgccctgatctttctccagaattccccctaagggtcactgttctttttttgttctttttgttttgttttgttttgagacagagtctcgctctgtcacccaggctggagtgcagtggcgccatctcggctcactgcaacctccacctttggggttcaagagattctcctgcctcagcctcccaaggagctgggattacaggtgggtgccaccacacccggctaattgttgtatttttagtagagacggggtttcaccgtattggccaggctgatctcgaattcgacctcagatgatccgcctgccttggcctcccaaagtgctgggattacaggcgtgagccacctcactcagccgttaactgcatctcaatacccaaatgagattggctttggggggcttccattgtctcggagctggagtgggacctgacttgtaggccggccctgcatgaactaggaaggaagccttgggaatgcacaagccggagtgtggtctgatcactacgcgtgtcatctccctttctcatctcagctgcattagtctctcccgcaagggaaaggagtggggtggggaagtgggttctgggcccctgttttgcctgccagtctgcaggcaggcccacctttaccctcctaaacgtcctctgaacagccattctctcaacagcaacctgactgcagacccagaacagccagcttaggaggagagactggagcttaacctgctcctggagagagacagcagcaaactccaccagaccccttttgcctggaacagcaggtggagctttcaccacgagtgtcccaggctgtcatttggagcccacgacctacccacggggagcagccaacagagtggtttcttctccaaagctaattcatctccaacgagctttctccccctccaaagctgtacagtcttaaatttaggaccagcaggggtgtttccacaatctcttaactccccacattgcagatcagtcaagaagcctggtgtgtctgttgacagatatacccatatggaaaattttaccttcctttcttccccttttcattcatttaaaaatggattgccaccaggcgtgctggctcatgtaatctcaacactttgggggtccacggtgggggtcaaaggcgggaagatctcttgaacccaggagttcaagactagcccaggcaatatagtgagaccccatctttaaaaataaatactgcagggtgcagcagctcaggcctgtaatcccagcactttgggaggctgagacgggtggatcatttgaggtcaggagttcgagaccagcctgtccaacatgatgaaacccccatctctactaaaaatacaaaaattagccgggtggtagtggcgcacacctgtaatcccagctacttaggaggctgagataggagaatcgcttgagcctaggaggtggaggttgcagtgagccgagatcgcgccaccacactctagtctgggtgacagtgagaccctgtctcaaaaaataaataaatacataaataaataaataatggattgattgattaacacaggagccaatgaactagagccagtgagcccagccggccagctgccttggaaggcctgtgggtataaaatagtttttatatttttaaatggttaacaaaaaaatcagacatttgcaactattttttggcttttggtttgtttttttttcccctccttttttttttttgagttattaagaaaaaacaacaaaaaacacaaccaaaagaactgacgagaggaagataaagcctcgggatcagccagagaccgagtggcatatgggatgaggcacaggtcaggtctagctgggtctgtggagcaaggtggtgggaagtcccaaggcctttgggcctgtggggtctgcggaaggagaggaggtcacttaagaaaatacatatactgtacacatctatacgacgcgtcccatgttgggggagtggggcgaggtcatgggagctggtccactctctcctcggaccagcctccccgcaggctcactggcttggccagcacagggacccctgcagctggctgttgtcttctgtggagcgagggaaggtaacagtttagctcccacccatggtgggcagaggtcagcggaggtcagaggcatggagatggccaccgctcagctaggaaatccctgtgcctggtgctcgtgcccgtcatacagtctgctttgctgtcttctttctactttttccttctttttcttctgggacggtgactcagggtctttggttgaggatttttttgagacagtgacttgctctgtcgcccaggctggagtgtagtggcacaatcttggctcactgcaacctccacctcccaggttcaagcaattctcatgcctcagcctcccaggtagctgagattacaggcgtgcaccactacgcctggctaatttttgtatttttagtagtgacagggtttcaccatgttgtccaggctggtgtcaaactcctgacctcaagtgatccacctgccttggcctcccaaagtgctgggatttcaggcatgagccaccgagcccagcctgcaactaattttgatggtcgagaacactgtgaacctcaattaggcaaaatttatctccctccccaaagattctgttcttctcaatagacctgtattaccaaaaaattgtacttaattattataacatttttatttcatcaagtagaaaactgtggaaattggccaggcactctggctcacacctgtaatcccagcactttgggaggccgaggcagatggatcagttgaggtcaggagttcaagaccagcctggccaacatggtgaaaccctgtctctactaacaatataaaaattacccaggcaaggtgatgggtgcctgtaatcccagctactcaggagactgaggcaggagaatcgcttgaacccaggaggtggaggttgcagtgagctgagaccacaccactgcactccagcctgggcaaccgagcaagactctgctcaaaaaataaaaaataaaaaaatctgtggaaattggtttcctttcttgtcacataggtacctatgccaggtatggtgactcacacctgtaatcccaacacttggggaggctgaggcaggaggagcgcttgagccctggagtttaagaccatcctgggcaacatagcaggaccatgtcttaaaataaaataaacattaaaaaagtaagtacttacatgttacctttcattttgcctcttggcccaaaaagcctaaaatatttattccattttctagtagtttacagtttgctggcccctggctgagcacaacaccacgttgtctaaattccgggactacagaagtatctaaggcaatcagggtccttgacttcatgtagtttagaaattagcaaggaagacaagtaacattatcaacactgacttgcttacatacaaattcagggtctcatctggacatttggttaaactccttgaatcttgggcctcctgtttcggcttgtctaattgtcatcgtctttcttcctttctttttttctttcttttcttccttccctccttttctttgcccctcttctctccttttttctttttaattttcttttctttccttacagggtcttgttctgtcacccaggctggaaggcagtgttgtgatcttggctcactgcagcctccacttcctgggctcaagccatactcccatctcagcctccccagtagccgggactacaggcacaccaccatgcccggctaatttttgtatttttttttttttgtagagatggggtttcaccatgttgctcaggctgggtcttgaattcctggactcaagcaatctgtctgcctcagcctcccaaaatgctcagattacagtcatgagccaccatacccggcccatcatcatctattctgattacaaaagaatgtgtgtggtgaaaacatttcaaactttacaaaaatgtgtgagaaagtgaaaatcccccataatccatcaacccagagcaaaataccaggaccagtttggttcacattctccaggttttgtcctaatggatgtgcagaaatacagtcacactatacatattcttctgcaattgctttttctacctcgtgctttatcttggacatcttcttttcattctttaaaacgtctctccacttttgggccaggtacagtggctcatatctataatcccagcactttgggaagccgagaccagcctgggcaacatagtgagaccccgtctctacaaaaaaaaaaaaaaatacaaaaattactgaggcatagtggtgtgcacctgtgtgtggtcccagctacgcaggaggctgaggtgagagaatcgcctgagccctggtaggtctacagtgagctgtgatcgtgccactgcactccagcctggtgacagagcaagggccctttctcaaaaaatcaaaataaaagaagtaaagcaatgggctcatgcccctgggagccaatggtttccccacatacccatcacccaaaagcagctggtctgacagaacaacaacaacaaaaatgtgtcccactttcaaccaccaatgcaggagtacagagaagagcggagactgtgtcagcaccagaatcccattgagaaaaaacactctggccgggcacggtggctctcgcctgtaaccccagcactttgggaggctgaggcgggcagatcacctgaggtcaagagttcgagaccaccctggccaacatggtgaaaccctgtctctaccgaaaatacaaaaattagctgggcatggtggcagtgagaggtgaagccagctggacttcctgggttgagtggggacttggagaacttttctgtcttacaagaagattgtaaagtgcaccaatcagcactctgtagctaggactgtaaaacgtaccaatcagtgttctgtagctagcaaggggattgtaaaatgcaccaatcggcactctgtaaaaatgcactaatcagcgctctgtagctagcaagaggattgtaaaacacaccaatcagtgctctgtaaaatgcaccaatcagcactctgtaaaatgcaccaatcagcaggagtctaaaagtagccaatctcagggaggattgaaaaaaagggcactctgataggacaaaaatggaacatgggcggggacaaataagggaataaaagctggccaccccacagccaaccacagcaactcacttgggtacccttccaccctgtggaagttttgttttttctcgctgtacgatacatcttgctgctgttcactctttgggtctgtgccatttttaagagctgtaacactcaccatgaaggtctgccactgcactccaacctgggcgactgagcaagactccatctcgaagaaaaaaaaaagagagagagaaaaaacactcttcccgcctgccaacaaattgtcgatttgatgggtgctttctggaagcacaatgcaaatgccttcctgaggctcacacgcacgaagcagcactcatgtttgtctttgaacaggcgaatgcaagtcagtgcccatggtcatggtagttatacacaagtctgtcaccctgtttcagaggaacttcacaagagctgttaagtcctaggtgatcaggtggacaaacgggtgctagtaacccatcaaccactggggaggagctaatggggagaagagcactccattgctgataggtttgaaagagtttttgcaacatctgagggcaaggtcaggcaggcaactcaaagtctagactgatgaggcctggatctgggagacaacacatagatgccgtcactaatgctatggagagagtggaagagcccagaaagagtgggcagagtccagtatgggaccccaacatttgaggagcaggccaggcgtagtggctgagcctataatcccagcactttgggaggctgaggccagccgggccaacatggtgaaatttgagacgatcgaggccaacatggcgaaaccccatctctactaaaaaaataaaaaattagccggctgtggtggcacatgtctgtagtcccagctacttggcaggctgaggcacgagagtcacttgaaccctggaggtcgaggttgcagtgagtcaagatcactccactgcactccagcctgggcgacagagccagacgccgtctaaaaaaaaaaaaaaaattaaggagcaggcagaagaaagagctgagaaagaataaagaagcaggaaggaaaccggagagctggtgtacgggaagcgatgaggggaggcctcgcggaggggcacggggtggtcctcaccgacaaaccaccccaggtagaacaagggctagagagcacaagcgactgggcaaaaggtcttagcctttacctggctctcaagggagaggttcctcctcctgtggaggcgggaaagaagagctgaccagggagaaatgtttgaagtttgtggttgacagcctggcacagcctcttccaggactccctcaaactccggatgccctgtggtgacccagagccccacaccctgactccgcagtctcccgggtctcagccagaatgggaggagagcaatctgattccacctcccctgcgattcctggcagttgccccatccctctccagccttcccatctccaccgttcctagcagatgtgctgtgcactaggggcttttcaggcaaaatagaggcgccttgtcagagaagcagaaggtgctagccacccagggcttacaaggatgtggggtcttcccaaaatgccttaaaagagtttctggccaagtgcagtggctcatgcctgtaaccctagcactttggggggccaaggaaggaggatcacttaagcccaggaatttgggaccagcctgggcaacatggtgaaaccctgtctctactaaagatacaaaacttagctgagcatggtggcatgcacctgtggtcctggctacccgggaggctgaggtgggaggatcgattgagctaggaggtcgaggctgcagtgattgcaccactgcactccagcctgagggaacgagtgagactgtctcaaaaaataaataaaatattaaagagaaaaagggggtcgggtctggtggctcaagcctgtaatcccagcactctgggaggccgaggcaggtgaatcagttgaggccaggattttgagaccagactggccaacatggtgaaacaccatctttactaaaaatacaaaaataagccgagcatgatggcaggcatctgtagacccagctctgtaggaggctgaggcatgagaactgcttgaacctgggaggtggaggttgtaggaagccaaggtcgcaccactgcactccagcctagggacagagcaagactttgtctcgaaaaaaaaaaaaaaaaaaagagtttcaacctttccaaagtctccttttccagttgatcccagaaatgcactcggatatggctcctactctgtcttccactctcctattttgctttctttggacacggactacgaatgactttttttcattctggggccccttatttcccaagaaaagccacacctgcatgagtggagtatgtcccttggcaagaacagctgcctctggttagtcaaatattgctcagagctctagaaaagcagaaggcaagggaccttgaggagggctcagcaggactgaccccaggactacagttccagaaaaaatacaagggagtttgggcatggtggctcacgcctgtaatcccagcacgttgggaggccgaggcaggtggatcacctgaggtcaggagttcgagaccagcctggccaacatggcgaaaccccgtctctactaaaaaatacaaaaattagccgggcatggtggcgcgtgcctgtaatcccagctacttgggaggctgaggcaggagaatcacttgaaccagggaggcggaggttgcagtgagccgagttcatgccactgcactccagcctgggcgaaagagcaaaactccgtctcaaaacaacaacaacaaaaagaatgcaaggtagccttgccctggggtggcagaatggcagagagagatctggtctgcattagcaaaagtgcaactagtgttacttaaccgctagcaacatgagggcttggtgggcttgccattgatgtgatgaattccatcctgggaagcttttacaaaccaggccctcccacaagcactgtgactatgaagatgaatagaatgaggtttccactttctaggcactcacagtcctggaaggaagctggcgaggcaggcagacgctttggtaagggggtgccgcagcagcgagccggcagaacgtgctgcctgcatctcactcctgcaaaccacgtgcagcttgttttcaacattggcgggaagagcagatggttcctaccaaatgttattgtattgcacattatgagccaagcaaagttaagtctaaaaaagtgactaacgaatctctcatgcaggattccaaataatttatctagatactctgccttcgagaaggtagcacaaggctgggtgtggtggctcatatctgtaataccagcactttgggaggccaaggtgggtgagtcgcttgagctcaggagtttgagaccagcctgagcaacatggtaagaccctgtctgtacaaaaagtacaaaaaaaatagccaggtgtgatggtgcacacttgtggtcccagctactcggggggctgaggtagaaggattacttgagctggggtggggcggaagttgcagtgaggtgagattgcaccactgcactctagcctgggtgacagagggagaccctgtctcaaaaaaaaaagaacggtaaaacataggctgggtgcagtggctcacacctgtaatcccagcactttgggaggccaaggcaggaggatcgcttgagcctaggagttggagaccagcttgggcaacatagggatgacacagggcaggtaaggcccaaattgaggcttagcccgggagggttcttggctttgcccaggaaagaattcaagggtgagccagtggcagaggaaaactgcttgattgaggtggcagtgctacagctcatgactgctcctgcagagcagggctacctgtaggcagtgtgcagagactagcagctcagaagcagttttgcagtcatatttatgcccatttttaattacatgcaaattaagaggtggatcatgcagacatttctagaaaaagggtggtaacattcaggtcattgggtcattgccatggaaggggtggataacttccaggtgttgccatggcaatggtaaattgacatggcacactggtgggcgtgtcttatggagagctgcttccgcctcttccctattttagctagccctcagtctggtctggtgtctgagccctgcctccagaatcaagtcctgcctcttacctgtggctacaaaaaatgaaaaaaattagccgagcatgggtatgtgcacctgtgttcccagctacttgggaggctgaggaggggggctcgcttgagccctggaggttgaggctgcagtgagccatgattacaccactgtaccccagcctgggcgacagagcgagaccaaaaaacaatgtgaatgaacttaataccactgaactatacactgaaaaatggttaagatggtaaattttatgtgtagttcaccacgcacacaaaaattgggactaaagggggacacagcagtggaacgggttgtggcaatgcctggggatgtccagggccaggggcggctctcagcaaagaatttctgctgccaattatgctgtgattgggtgaagatctgagaggcaccgcaattgttttcaaactaggtccttgtgaatacttctaattatatgacctcacgccgaggcagccggccaaggggtaactgtttggccagtgaacagagctgccctctgtggtcggtggcctgcagccttctgggtgagggtgggggtggggagcctgtactaaattgttggataatatggtaaaggtggctgcagtttcctttcaacttttcctatttccccttctaacccactttcccacccacaaaataatgtgtcttcagagagccctcggcttcccagggctggaggtggagtggaaagggttgcattatgattgcaaccccagccagccactacctcatcatggagtggatcgtttcctattcttggagactttgggtctgattcacctctgaccacacaaagccatttcaatgcgtctttcaggagctcctccacccagcccctgtcaggaccctcagcacccacccctaagagttctttgtcccgagaaactggtgcgagccagaacggatcaggagagattggtggcagcagtcatttaggtgcttgtctttggttagtgcggccctgcaaggtgccgtctcattgggaatttccttgcacctgccccactaaaggcaggtgggtagtggtgacaacacatatatggagaagttgggaagtgggagagaaacgtttgcttccttcctgtcctttcacagatcccaaacccgctgagggcttcccatggaaagctgtctgggcccctcagcctgcctctcttgggaccccccacagactggccctggctgacctttgcaaattcctctctcatttttcccctgcagggactctcaaccccagccagactgatccacccaccatcctcgcaaaatgcctttcttccatgacgactgccccttccttccttgctcacgccatgccctcccccaatctggaacgccctccccactcctcttccctgcaactcataaccatttttcaaggcccagttccaaccccaatcccacttcttggatgacgcactcctcttctgtcccagtccaaatttccgatgtcagcatctgaactcgggataacctcattccccgagctgccactcattcaggcaccagtagctctggacgggggctggacacgcccctgtgttgtctctcacttaatcctccccattatctaataagcaccgccactgtcctgccactttgcagatgaggatagctgagtcttagaaaaggaaaggaacttgcccagggccatgagattagtaggtagccaatctgggattcaaattcatttttttctagccccaaattcccttgttttaatttacatgatcgcaattgccttaactccctgagaaacatgactcgtttcattcattcaaccattcattcaatgaacacagtacatttcgtgccaatcacccagctaagctgtaaaaatccccagctttgccgggcgcggtggctcacgcctgtaatcccagcactttgggaggccgaggcaggcggatcacaaggtcaggagatcgagaccatcctggctaacacggagaaaccccgtctctactaaaaatacaaaaaattagccgggcgtagtggcgggcacctgtagtcccagctactcgggaggctgaggcaggagaatggtgtgaactcgggaggcggagcttgcagtgagccgagatcgcgccactgcactctagcctgggcgacagagcgagactccgtctcaaaaaaaaaaaaattccccagcttctactcccaaggagtttccattctggtggtgcgggaagatgtctttattacagaaagtggaggaaggatggtagcagaggggagggcagagttataattcccactgaatggatgcggaaactgaaggaaggcaggacaacacagtcggccaagatggtaagcagagcccgccatcaccacccagggatcagggcttcccaagcactgactattcttccttgcattttctgggtgccttgctcgatgcaaatgcatacaaacgtaggcttggataagcgccttggcaacgcccctacaaatattcatgatcattattagtatgttaccaacctattggttaattcttctcctaactcaggagacctccaaaaagaagagggatggcctgcgcttccgacgtggcaggaaaggagtcacgtgctccggggtccttccgcgtcgccccgcgcgtccggagccaggccggggttgccaagcaaccggtaaacgccgccgtttgaggagcaccggagccgcgaccgtggattgaacgcttccccagagacccagaagcagaaggagcggacccagggtaaggggcgggcgccaggaggacgtcggaggctaaagactagagtggagagtgacagggagagacttacagggtaataaccaccaagagtgccaaacattcctcttggggggcttccttctgggatagctctgccagatggtggctgccaggactagcgctcctagtgccctcttccccttagtcctcgctgccctggatccgccccaagtcgcaggaccctgcagcctctgtacaccctgcctcataccctcctacccactcaggtcctgatacagtccttgtcctggagtggactggagacctctgaaggatttacagctgaatggatggaaaaaaaagaagaaaaacagcctccggctagggtgatgggaagatgggccctttaagaggagagctttctgctcaggatagagggatgtaaattaacagtattgcacacctgctaggtggcaggtgttttaagtgctttctttcatttcttcctcaacctgggagctggcgttctcgtgtgatcgaggtcatacagttggtgagttcctccggagcgtgtgcagttcctccttcctgctcaaggtcaaggtttaccacattctcttgaaccacagaagtgcgtcttctcccagctttcagaccctatgtgttttcctctcgaatccttggtttcaaatcctttgcttgtttgtcacggtcagcagaggaggaacaggggagagagctgtagagagaagcctggtaggcgctggtatcacagtcactaacgcagcaggtgacaggagtcttgggccccttctatgtgccagtccctggggacgggagtgaataaaagaccacagtctttccgtcaaggagaccacaaggtagttgtgagggcaggtagtcactgacccccatcggtctccaattctggggacctcttcccaactcgtcctgccctcaaccttcactttccttggggggctcagccatgcttagtgctatcctgggggaaaataaatgggggctttctagggaggtctgcctcttttgagggtagagtgagtccctcaggaccccggaattccagaaggtgcacaaggacataagaaagagaaagaaagctgggtgcggttttcacacctgtaatcccagtgctttgagaggcccaggaggatggatcacttgaggtcaggagtttgagaccagcctgcccaacatggtgaaaccccatctttactaaaaatacaaaaattctggccgggtgcagtggctcacgcctgtagtcccagctactcggcaggtggaggcagaagaattgcttaaacctgggaggtggaggttgcagtgagctgagatcaggccactgcactccagcctaggtgacagactgagactccgtctcaaaaaaaaaaaaaattagccgagtgtggtggcatgcaccagtagtctcagctactcaggagactgaggcacaagaatcgcttgaacttgggaggcagaggttggagtgagccaatatcacaccactgcactccagcctgggtgacagagcaacactgtcccaaaagcaacaacaacaaagaaagagggaaggaagtcctctcctgccaggtgccatgcagggcccaccactcgcaggaacccagtaggggctgtaccagggaccaagaagaagaggaaaatgttctcatctccttattccactagggagttcaatgtggagggctgaccttccagcttgcctccttcccagtctcccacgctgacactcctcctccccatcactcccttggccttcctcccagcttggaaaacacactttcccttaagccaccggaggttctctccaggaattactttgctcattctcactgcacaagacgagttttgtttttatagtgagtgaaggttcccatctgactgcctccccggggatgcgggagacgcctgaatctttgatgtctggaccacagcgtccctgattctgcgtgttcctgtgtttgagactcacagtggtgttcttcacgcctctgggactctaggttcccacggggggaggatctccccccaaaactccagagggcagtgacactgctcccgtccccgctctgtcaccccatgcagacactcctgctcaggccttgcttggggaagcccaccctctagcactagtctcacaagaggttgggggagacctcctgagacgccctttgctgaccttgctattcatctgtgtgccctgctagcttgtgagaagagcttgctctgggtccttgaatgggttgtcttcccgtcaccaggccagtctttaaatgtcccctctgtctgcctccagacacaagacaatgcctctgttctcactcggggcttggccttgggaaacaccaagaaggaaagcaaagctgttaaaaatctgatctgggctaaagaggctatttctgtcttcctggagtttcctcattctcttcaatctccttgtgtcccctaggagccagctggcttgcagcaatttcttttaaaagtcagagacaggcagccctaattgcctgagtcctgcagccccatgtgggaggcacagttgcttcacactgtgttggcaaaggggaggatgccacgggatttgcatgctttttcacaaggccgtagctttgtccatgtggtaaaaacacactggggcaccccgctacaatctgggcttctcatcccaccctgtgccctctaagccattgctcccacccaggaaagagaatttccaaactacaagaaagagaagaaaacaaggctgggtgcggtggctcatgcctgtaatcccagcactttgggaggccgaggtgggcggatcacttgagatcaggagttcaagaacagcctggccaacatgctgaaaccctgtctctactaaaaatacaaaaattagccgcgaatggtggcatgtgcctgtaatcccagctacgggaggctgaggcaggagaatcgcttgcacccgggagacggagtttgcaatgagcctagatcttgccactgcactccagcctggacgacagagcgagaatccatctcaaaaaaaaaaaaaaaaagaaaaaagaaaaaaagaaagaaaatgccactttctgcaacagtctggttaaggttgagttgctctggggctaggagtgggatggggtggtactgtcttcaagacacaatgtatatggatgcaaagggttaaccttcctaccctccttctccccacctgctgccccagctgctccagggcccaagttccccctggcacatgcttctaggggcacacagctcctgccctgcctctcaggggccagcggccaggacccactggtctggtgccttgtagccctggaggcgggagagggtaggtaagacacaggtctggtagtcatgttcacctagggtgattgtgaaaaacacgaattgctaggccctgccccaggcatctagttcagcatttgcaggagagaggcctgggagtctgtgtatttttaaggaagatcccaggtttcagaaacgctggttgagagattaagttccctcactttaaatcaatggtcctcaaagttggctacacatggaattgcctggagaattaaagaaaaaaagcatatactgatgagagattctgatgtagttgttctggggttcaaacagcattgtgatttcacaaagccctgcaggtgtttctaaatgtgcagtcaggactaacaatcactgctttagagccagacatgcctggtggttctgcctgaactgaagaactgtgacctttggccctgtattaatacttcatctctccaggcctcagtttcttcatctcgaaaatgggctcatgcctataatcccagcactttgggaggctgaggcaggaggatcacttgagcccaggagtttgagacaagcctgggcaacatagtgagaccctcaactctacaaaaaaaaaaaaattagtctgatgtggtagtgtctgcctgtggtcccagttactcagaaggctgaggtgggaggattgcttgagcctgggaggttgaggctgcagcaagctgtgttcatgccactgcactccagcctggatgacagagcaagacactgtctcataaaaagaaatgttagtgagaattgtgatcactctttgggagtggtgctgggcatgcaggaagcacgcctggaaactgttgttcatagtgcttgcaacctggtcagtctttacatattctggatgcaagttctttatcaaatagataatttgcagatattttatccaagtctgtggcttctctttttgttaacattgttggccgggcatggtggcgcatacctgtaatcccagctactctggaggctgaagcaggagaaccacttgaacgcaggaggcggaggttgcagtgagcagatatgccactccactccagcatgggtaacaaaatgagattccatctcaaaaaaaaagaaagaaaagaaaagaaagaatgaataagacctactatttgataggacaacaaggtgacaacagtcagcaataacttaattgtacatttaaaaataactaacaggccgggcgcggtggctcacgcctgtaatcccagcattttgggaggccaaggtgggtggatcatgaggtcaggagatcgagaccatcctggctaacacggtgaaaccccatctctactaaaaatacaaaaaattagccgggtgtggtggtgggcacctgtagtcccagctacttgggaggctgaggcagaagaatggcgtgaacccgggaggcggagcttgcagtgagctgagatcgtgccactgcactccagcctgggtgacagagggagactccgtctcaaaataaataaataaataaaaataactaacaaaggataaattcttgaggggatggataccccattctccatgatgtgactattaatatctagtatttgatagcacaacagggtgactatagtcaaaataatttaattatacatttaaaaatagctgaaagagtataactggattgtttgtaacacaaaggataaatgcttgaggggatggatggataccccatttcccatgattgtatattgtatattgcatgcctatagcaaaacatctcctgtgccccataaatatatacacctactatgtaaccacaaaaattaaaaattaaaaaaaaatagcaaaacctgctcacaggcaaacctgctcacgtaatcctgtttttgagatagagtcttgctctgtcatccaggctggagtgcagtggcacaatctcgactcactgcaacgtctaccttccaggtttaagcgattctcctacctcagcctcctgagtagctgtgattacaggcacgtgccaccatgcctggataatttttggtatttttagtagagatgggttttcgccatgttggccaggctggtcttgaactcctgacctcaagtgatccaccggcctcggccacccaaagtgctgggattataggcatgagccacaatgcccggcctaatctcttgggcgttgaaaggcctttggttgtaaatctaccaaggcaagctctccttcagtttatcttcctcccaccagcaccagccactcatccacatcttttgtcctaaggctctgtgcaaccccaggagccttgcacagatcctcaatctgagcccctggaaacttgctatcaaaggcacaatttctgaaagtgcaggtggctggcagacggaaatctctgctaattccatggtgtgatatggcaggtacacaggtcaaagcgccaaccactgaactcattgagaaagccctcagacccagtggagtctagtgatgtcatgggggagtcagaaaggtcaagggcaatatgtgggaatggcccagcccattgcatttttacaacttctaatcagcatcagtgagaaacccttccttgcgtggcctgtgaaccccgcctctgatgctgctggagcactttcatttcacttctcagcatcctgtgggtgtgtcaggtctcagaaagactaagtggccctgcctaggtcacgcagctggtgacgggaggcccagaacttgaaatcagggccgagcccagcccacttcccaattccctgctgtgtcccatgaccagtagcacgcgtcagaggctttcccaaaggcctccatgtcccgcctgttggggaagcccctggctttctctctgtctgggattgactctcagctctgtcctggttggagagaagagatttccaggatggtacccagacagtggtggaggccagagtctggcaaccaacgagccttttggacaattgggtggggagttgggtcattgggttggagaggaggggttcaagaagaggcccaggggtctcaaatctgtgtcctgtgtgtttcatgcccagcatggcagggaatttagtccaacatcatcaccatcaatatttcctcctgccctgtcaataaacactgattcagtaaaaaccgtattgtaccacgtgcgatggctcatacctgtaatcccagcactttgggaggctgaggcaggtggatcacttgagcccagaagttcaagaccagcctgggtaaaatggcgagaccccatctctacaaaacaatacaaaacttagccaggcatggtactgcacacctgtggtcccagctacttgggaggctgaggtgggaggatcacttgagcccgggggttgaggctgcagtgagctgtgagcacaccactgcactccagcctgggtgacagtacaagcctttgtctcaaaaaaaaaaaaaaaaaaaagccctaaaaacaaaagacgaaaactgtatcatttggtgggtaagagctttggaatgggggcagaccagctgcagcatgcattagctataggaccttgggcaagtcactgatggcatctaagcatcaaatgccttcaaagaaaatggtgattttatttatttatttattttgagacagagtcttgctctgtcacccatgctggagtgcaatggtgtgatctcggctcactgcaacgttctcctcccgagttcaagtgattctcccacctcagcctcccgagtagctgggattacaggtgtgcaccaccatgcccggctaatttttgtatttttgcagagatggggtttcaccatgttggccaggctggtcttgaactcctgacctcaggtgatccacctggcttggcctcccaatgtgctgggattacagttgtcagctaccgcgcctggccaaaatttttattgccctcctcagagagcaactgcaataactaaacagggtaatgcttagcatatagtcggcactcaggatttttttttaatgcggatgcagcttctggacaaattcctaggatctccccaccaccccttgcttcctgccccaaccagattgagaacctggagctgtcctggcaggacctgtggagatagggaaggggccggtggggtccctcaccccacaccctccctctgccccccagcagccggcaccatggagattgtgtacgtgtacgtcaagaagcgcagcgagttcgggaagcagtgcaatttctcggaccgccaggccgagctgaacatcgacatcatgcccaaccctgagctggccgagcagttcgtggagcggaacccagtggacacgggcatccagtgctcgatcagcatgtcggaacacgaggtgggtccctgccccaagggccctggcctgtcaggtgtggccaggcagggcggccagctggggccggtgagtggttctgtgggtccttgtccacctgaaagccagttagagtagaccaaatgcagatgctggaagtgagggcagaggctccccctgagttccacgcagtgctcagggtcagaggaagacccagcacccgccttcctcgagccagggaagtgcaaatcacaatgttccctctcccaagagctcttgtttcacctcgaagacacttaccagagttgttttggatgtttggtgtagctgggagacattttttttttaaacagggtctcactctatcacccaggagtgcagtggtacaaactcgacttactgcaaccttcgtttcctgaattcaatagatcctcccacctcagcctccctggtagctgggactacaggtgtgcaccaccacgcctggctaatttttgcaattcttgtagagatgaggttttgccatgttgcccaggctggtctcaagctcctgggcccaagtagtcctcccgccttggcctcccaaagtgctgggaatacaggcatgagccactgtgcccagcgtgggagagatattctgagggagcagagattcatatctacaggcaactacccagcttgagaaaagggaagtgtcccacagaaagttccagccagaggggcctccacgataagagaacttatcttgagggtcatggtcatgtgttcagaggccaaaaattccctgtctctatgaactaagtgattcaccctaattaggtcaacaactgctgagataaaatgataacgaaatcacttgatttggccaaaacacgtccaacagtcaggtgggtgtgggtggtttcagtgactcacagttcaaatgaattaggtgcttctctcccaggaccaactgctcccccggggatgagaaggactgtggccatggtgtagccaataagcagaatggccgctatgtgggccacaccctgggggccctcctgtcgtttccagcagctctgccttttccagacttgttttgttttgttttgttttgttttaacctttcctatggtgctgatccagattttaccttttgtgagagctggcttaaaaatggaaaggagatgggagtgacttcatgaggatggggtttccatcctgggtgatgtaagagttttggaactaggtggggttgatggttgcacagcactgtgtataataacgctgctgcagtgtacgctttaaagtggttatgtggtaaattttatgttacatgtattttaccacaatttcttaaaaacaggaagggctgggtgtgctggctcaagcctgtaatcccagtactttgggagaccaaggtgggaggatgcttgaggccacgagtttgagaccagcctgggcaacatagtgagacttcatttctacactttttttttttaattacccagttgtggtggctcgcacctgtggtcccagttacttgggaggtggaggcgggcggattgcttatgccctggagttcacagcagcagtgagctgtgattgcaccactgcactccagcttgggcaacagaatgagaccctgtctctaaaaataaataactaaataactaaataaataatttttaaaaaataaagtgaaaagaaggcagaggcgagaggatcacttccgctcaggagtttgacaccagcctgggcaacatggcgaaacaccgtctctacagaagaaaaacaaaaacaaaaattagccacgtgtggtggtacatgcctgtagtcccagctacttgggagtctgaggctggaggatcccttcagcctgagaagtcaaagctgtactggccgggcgcagtggctcatgcctgtaatcccagcacttccagaggctgaggccagtggatcacctgaggtcaggagttcaaaaccagcctggccaacatggtgaaaccccgtctctactaaaaatacaaaaattagccggccatgatggcgagcacctgtaatcccagctactggggaggctgaagcaggagactcacttgaatccaggaggcgaaggttgcagtgagccgagattccgccattgcattccagcctgggcaacaagagcgaaactccttttcaaaaaaaaaaaaaaaaagctgtagtgagtcaagatcatgccactgcactccagcctgggcaacagagtgagagaccctctcttaaaaaaaaaaaaaaggaaagaagggaaagtggcgacacccacgtgtaaaactgtcctccctgctagagaggataggcaaagcaaatccaaacttggagttttaacgttcaatttttgtgacactgacattgtcagtgatagggtggcattgttaatgatagagtgaagaaaggctattcactttttcttttttctttttctttttttttgagacggagtctcgctctgtcgcccaggctggagtgtagtgctgtgatctcggctcactgcaacctctgcctcccaggttcaagtgattctcctgcctcagcctcccgagtagctgggactacaggcgcccaccaccacgcccggctaatgttttgtatttttagtagagacggggtttcaccgtgttagcgaggacggtctcgatctcctgacctcgtgatctgctcgcctcggcctcccaaagtgctgggattacaggtgtgagccactgcacccggccaattattcaccttttctttggattctcacagagcagatggacaggcttctctggtccattagaattcagataaggtcagaacaggattttcatgaccacagctaccagttgcaaagctgcttagctccacagggttgcgctgttgcagctacctgtgcccacctgatcaccaggaatttccttgcctgcatttgaaaatactgtggctccggccagggcgcctcagcatccagccctgggagcccccgtgggacctggcttgcagaagtggccgagggtttgggagtataccagggtgacgtcttccctcctgcggctctctgtttaggccaactcagagcggtttgagatggagacccggggagttaaccatgtcgaggggggctggcccaaggacgtgaaccccctggagctggagcagaccatccgtttccggaagaaagtggagaaagatgagaactacgttaacgccatcatgcagctcggctctgtaaggcttcctcctgccccagctgcaagagccccatccatcactgcagctccccaagggatgcactgccccagctgtgcctggccatcgctgtgaggctcgtgtgaatgctggggggaaggggaccagctgctacctcaaggagccttctgtctgggagcaggcagaggtcccaatcacagaccaacagggaaggcagggaggtacaagggctgaccaggcatcaggaggagtctgaccttgggcaaaggtgactcccaaagtgccccacccagcagccaatagggatcattcattcatttgacaaatttggactgaacttcaagcctctgccaggcacagtagaggttgcaaaatgaatctcataattgttctacatacttgccagtgcaaaaaaaaaaaattgttttaaggaaaaagaaatttaaaatttaaattaaaagaaaaagaatctcttatacatcctgtcccaaagagattgcagtccattggaggtcaaagacaaatacagagacatcaccagataacataaaaagaaagaaatgctgaaagagaagcatgacttgtcctttgactccatgaggagggagggtcaatctcctgctgaagggaacagggaaggcttcctggaagaagtggcagggcttggttgtcctttggtggacatttgcaataaaggggagggcattctggatggaggaaccagctgtctgcaaggacaggaagaaggagatgagtgccatatacacacacacacatatatatatatagagagagagagagagagagagagagattaataattttatttgggctgggcttggtggctcacacctgtaatcccagcactttgggaggcagaggcaggcagatcactcgagctcaggagtttgagaccagcctggccaacatagcaaaaccccatctctactaaaaatacaaaaattagccaggtgtggtggcacatgcctgtagtcccagctacttaggaggccgaggcaggagaattgcttgaacccgagagacggaagctgcagtgagtccagatcgcacccctgcactctaacctgggcagcagagcaagactgtgtctcaaaataataataataataataataataataataataataataattttgtttgtctagcatggtgttcttcaaccttttcttcattattggccttcatgttttttctaatggccttctgcctccataaaatgtttgttgttgttgagacagagtctcattctgtcacccaggcttgagtgcagtggcgtgatcttgggtctctgcaatctccacctcccgggttcaagcaattctcctgcctcagcctcccaagtagctgggattacaggcggctgccaccatgcccagctaattttcttttgtatttttggtagagatggggttttactatgttggccgggctggtctcaaactcctgacctcaagtgatccacccgcttcggcctcccaaagtgctgggattacaggcgtgagccaccgcacccagcccatcaaatgttaatgctatagacatactgtatatctgttcatgcgctgcatgtatttccatgctttgtacctaaaaagcaatattattttacccccaggaaccaattgaaaattcctccattgaaagcacatggttaggtggatgggaaaagcccctggctatgtcctgtccctcccagactccattgcaggcctgggcaatctgaaaggacctccatttactgcggagaacttccaatgtgtcccccctagatcatggagcactgcatcaagcagaacaatgccattgacatctatgaagagtatttcaatgacgaggaggccatggaagtgatggaggaggacccttcagctaaaaccatcaatgtgttcaggtagcgccatagccaggcaggtgtctggccaccctccgtcacccccatgcatgggcgcctccaaaggcaactccttgccatcgctgcatgccctgggtgcagcactgtctgtgctctgagcttgataagtgacgtggtgataagtcacccagcagagaagtggccctgctctgggggcgggtctggttgatggaaagggagtacagactccagagaaagtgaaattgcccagctgcgtacaggtggggcatgttcctgcagggcagagtaagtacaagtaccaagcatgagcagctagcagcactgtgggcacacaggcccccgccgcggcctgcactcatgcgagtatatccatgaataactccagaggatagaagtttgacaccagggattcatcccacaggttgtgtgtgtgtgtgtgtgtgaaatcaccgcaggcgtggatattcactgcagagggtgtatgccagccaaagactagaacaagctaagtccatccataggggactggttctagcagttctggcacacccacacgacggaatgccatgcacctggtaaagcgagcggggcagtctgggcatggtggctcacgcctgtaatcccagcactttgggaggccaaggcgggtgcatcacctgaggtcaggagttcaagactagcctggccaacatggcaaaaccccgtctctactaaaaatacaaaaattaactgggtgtggtggcacatgcctgtaatcccagctactcgggatgctgaggcaggagaatcacttgaacctgggaggcggaggttgcagtgagccgagatcgcaccactgcactgcagcctgggcaatacagcaagactctgtctcaaaaaaaaaaaaaaagcagtgcaacttcttatgtgctgatatggagtcatttccaggattcagtatgtgaaaaccaaaccaaaacaaagccggtgcagaacagggtgtgcagagtgccactttttgtggcagtccccaacttaaaccattttttgtctttgcaaggctgcaaaagcaatgcaaatccaggagaaaccgtacttcaagtacccatacaaccattctgttttccaccctcagtacagtattcagaaaattacatgagctgttcacctctttattataaaataagctttgtgctaggtgattttgcccaactataggctaatataagtgttctgagcacataggctggactaagatgtgatgctgggtaggttaggtgtattcaatgcattttcagctcctgatatttccaacttactatgggtttatcagatgtagccaacatcattagataaggagcatctgtatatgtgtataaatatatgcatatgtgtatgtgtgtatatatgtgtagatgtatgtttacatgcctgatgtgaggagaacatctgtgattttggacttctggcatccggaactgtgatagaatcaatttctgttgtttgaagccacgcagtttgtgggacctcgttgcagcagccccaggaacagaataccccatcccagagcacctttgtagggtgtacaaaagaagctgataggaaggagagcttgggaacagggatggggagaagcctggggaagaaggactcctcggccttgaagtctggtggaaggagttgcagaaagtgggtggaagtgagaaagaccatgctctgtggcctcggttttgaccatgaagaaaaaagcaaggccgtccaatcagatgagtggagatgagcaggaggctggaatagagcagctggggaaatgcggaggggaagcctgtggacctggggcagaggacagaccttgggtctgggtgatgcaggactaggggtgtgaaaggtgtttgggaaatgacttgcctcagatcccagctctggggaattcatttcactaccacgactgacttaggggcctgggaagtacctagcccagtcccagcacagcaagaaagaactcttttctgaggcagggctgactcatggtgtgcaagcagggccagtggctgtcagcaaggggtgtgcaggagagggcatggcggggcagaggctgcccttcctgttgccctccagccctgctgggctctaacctcgtatatggaccaccagagcaggatgatgcattagaaatcatccgaggggccgggcactgtggctcacgcctataatcttagcactttgggaggcccaggtgggcatatcatctgaggtcacgagtttgagaccagcctaggaaacatggtaaaaacctgtctctactaaaaatacaaaaattagccaggcgtggtggtgtgcgcctgtaatcgtagctactcgggaggctgaggcaggagaattgtttgaacccaggaggcagaggttgcagtgagccgagattatgccactgcctgggggacagagcaagactccatctgacaaaaaaaaaaaaaagggggagaaattggggaacctcacatccagccttctgctctcttccctctcccctgcagggacccccaggaaatcaagagggctgccacacacctctcctggcaccccgatggcaacaggaagttggcagtggcatactcctgcttggattttcagcgggcacctgtgggcatgagcagcgattcatacatctgggacctgggtgagaagcagcggggtcctggtggcctgggagggctgagggctgggaccagcacaagtggaggagcgggagggaggggcaggaggtcaaggacactcacgcggttggtgcctcaagggaagggcccgcagtcgaggaggaacacactcttctccttcctctcttgtctggtttcaggcagagccaagcagagtcaaatcagaagcaggaaacccccaccaattccagattcttagttcgaggcatgaagacctgaccccatgggatctcaattcttagctcctaaggagcatatcaggccgggctcggtggcccatgcctgtaatcccagcactttgggaggccaaggcaggtggatcacctgaagtcaggagttcaagaccagcctggctaacatgataaaaccctgtctctactaaaaatacaaaaattagttgtgcttgatggtgggtgcctgtaatcccagctacttgggagactgaagcaggagaatcgcttgaacccaggagtcagaggttgcagtgagccgagatcatgccactgcactccatcctgggcaacagagtgagactctatctcaacagcaacaacaagacagagtgcccagcagactgagaagggactcaaggggcggcggaatggaacttgtgcctttgtcccatctgtcctgacacttgcctttaattcatggcctgcaggggcagcgtgtccatttattagcacaaaccattgtctacagaagggctggcaagacacaggcagggacagggtggtggtggcttcacgctctccagcttcccttcgttgtcagcattattaaaataaacatgtaggtgccaggcagagagctaacgcccgacattccaacagctcagcgagttctggcagcagccctatggggtggactccgtcattatctgcagtccacagacctggttggaagaaaccggcagagagttgactttgtgtaaaaactttagtatcaaaacctcgtttcacaccaaacctaggaactggactagaaatataattatcacacacatacgcacaccccaatcctgttcaccaaaaataaaaaccatcagcaaagcccctagggtcaagaatgccagattctggccaaggtggaccagggggtgcaggctggggaaagactggaggggcttccaggcttccccctctgccaccatgcccccgctacccacccgcagaaggggtgaaactggttgatcctgtccttttctttccgggcctggtggggataatttttttgtgctttatagaaaaccccaacaagcctgaacttgctctgaagccatcgtctccactcgtgacgttggagttcaaccccaaagattcccacgtactcctgggtggctgctacaatggacagataggtaaggagggacctaggcttttttatttttatttttattttttttagatggaattttgctcttgtttcccaggctggagtgtagtggtgcaattttggctcactgcaacctccgcctcctgggttcaagtgattctcctgcctcagcctcccgagtcgctgagattacaggcacccaccaccacacctggctaatttttttgttatttttagtagagacagggtttcaccatgttggccaggctggtctcgcactcctgacctcaggtgattcacccacctgggcctcccaaagtgctgggattacaggtgtgggccaccacacctggccgggacccagattcatagtcagagccaatcctgctgctatagggcagagcccacatggcagcctgggctcggccacagaagactaagtggggtgagggcctcccatagctgaccaactgcagacacgggtgaggcaggtttggctgacacctcagcagtgtctcctgttactactgtaagtctaaaattagctcaaaataaacagttttaaaaaactatagttcaagtaaaatcagagaatatttgactaggggccgccataaagggatgatgagagcgttggggagccctattttgggagaggtttctgggaaacctacatgctaacggatatgggtaatactggccttatagaatgagttgggaagtattcccttctggaagtttgtgaagaattgatattaattttttttttttttgagatggagtctcgctctgtcgcccaggccggagtgcagtggtgcagtctcagctcactgcagcctccacctctcggattcaagtgattctcctgcctcagcctcctgagtagctgggactacaggctcatgccaccacgcctggctaattttgtcttttttcagtagagttagggtttcactatgttggccagacttgtctcaaattcctgacctcaagtgatcctccctccttggccttccaaagtactgggattactggcgtgagccaccatgcctggccgctattaattcttgaaatgtttggtagaactcatcagtgaagccatctggtccctggcttttctttattggaagcttaaaagttacaattcagtctgtttatttgttatagatcctcttcacattttctgtttcttctttaattgcttttggtagtttctgtctttctaggaacttttccatttcatcaagttgtctagtttgttgacatttaattgttcacagtattcccttataatcattttctttttctttttttttttttttttttgagacagagttttactctgttgcccaggctggagtgcagtggtgtaatcactgctcattgcagcctcgacctcctgggcccgagcaattcttccaccccagcctcccgagtagctgagcctacaggcatgtgccaccacactcggctaatttttgtagtttttttagtcacaaggtttcatcatgctgcccaggctggtcttaaactcctgggctcaagggatccgcctgccttggctggcctcccaaagtgctgggatgaaccaccacacctggcctgatttcagtcttttaaaatttattgagacttgttttatggcctagcatattgtctatcctggagaatgttccatgagcacttgagaagactatattctgcttattgtccggtgtagttttcctttttttttttttgggacggagtcttgctctttcgcccaggctggagtgcagtggcgcgatcttggcccactgcaagctctgcctcctgggttcacgccattctcctgcctcagccttccgagtagctgggactacaggtgcctgccaccacgctgggctaattttttgtatttttttttagtagagacggggtttcaccgtgttagccaggatggtctcgatctcctgacctcgtgatccgcccgcctcggcctcccaaagtgctgggataacaggcgtgagccaccgcacctggcctgtccagtggagttttctatagttgtctgggaggtcttgtctatagtgttggtcaagacttctatttccttgttgatctttcacgtagtaattatgtctattattgaaagtaggatactgatgtctgccattattattgttgaattgtctatttctccttcaattttgtcaggttttgcttcctgtatgttaaggctatgttattaggtacatgcacatgcttataattgttaagttttcctagtgaattaacccttttatcagtatatgatgtcttcatttgtctctagtagcatttttcatctcaaagtctgtctttgagataagcactccagccctctttggttaccatttgcatggtatatctttccccatccttttacttttaacctgtttgcctctttgaatctaaagtatgtcttgtagccaggtgtggtgacacgcacctgtaatcccagctacttgggaggctaaggcacgagaatcgcttgaacctgggaagctgagattgcagtgagtcgagatcatgccactgaactccagcctgggtgacagagcgagactccatctcaaaaaaataaaaataaaataaaaaaataaagtatgtctcttgtagattacatgtagctggcatacaagtgaatcatagttttgttttgttttgtttttgagacagagtcttactctgtcacccaggctggagtgcagtggcgtgatctcggctcactgcaacctccgcctcctgggttcaagcgattctcctgcctcagcctcccgagtagctgggattacaggtgcatgccaccacgcccagctaatttttgtagttttggagagatgaggttttaccatgttggccaggctgatctcgaactcctggcctcaagcgatatgcccacctcggcctcccaaagtgctgggattacaggcatgagccaccacgcccagcttggatcgtggttttttccttttaatctattctatctatctctggttttaagtggagagtttaatctatttacattaatttaattactgataaagtttacatctgccattttgcttttttttcctatatgtcttacatctttttgttctttctccataactgccttcttttgtgccacgtattttctagtgtaccattttaattcccttatcatttcttttttttttttcttttcttttttttttagagacaaggtctcactctgtcacccaagctggagcgcagtgctgtgatcatagctcactgcagcctcaaactcctgggctcaagcaatcctcccacctcagcctcctgagtggttgggacaacaggtgcacgtcaccacactcagctacttttttattttttaatttttgtagagatagggtcttgctatgttgcccaggctggtcttgaactcctggcctcaggcaattctcccaccttggcctcccaaagtgctgggatttcaggcgtgagccaccacactcaacttaagctattgatcttattgatgatcctgtgtatgtgatgagtcatttttctcttgctgctttcaagagtctctgtcttcagctttgattatgatgtttctaggtatggatatctttgagtttatcccacttggaattcattgagtttcttggatgtgtagattatttttttaaaaatcaaatatggaatatttacaaccattatttattcaaatattctttcctaccctttctctctctcctctccttctgtgacttccattatgtgtatgttggcatgcttgatggtgtcccataggtctttagactctgtttttctttgttctcttttctttctattcctcagactacataatctcaattgacccatcttcacgttcagtgattcttctgcctgctcaaatatgccatcctgtagcttctctgctatatttttattttggttaatgactccagaatttctattttgttctttcttttaaaaataatttctgtctcatttggatgtggtggctcgtgcctggaaacctagcactttgggaggctgaggtgggtggattacctgaactcaggagttcaagaccagcatgggcaacatggtcaaaccccatctctacttaaaaaaaaaaaaaaaaaaatcagccaggtgaggtggagtgcacctgcaatctcagctacttgggaggctgaggcaagagaattgcttgaacccaggaggcagaggttgcagtaagttgagattgtgccactgcactccaggctgggcaacaaagcgaaactctgtcttcaaaaataataatgataatgatttttgtctatttgtatcttttatttggtgagagatcatctcatgcttttctttagttcttttgatgtgacttcctttagttctttgaacatgtttagcatagctgatgtgaggcctttgtctagttagtccaatatctgggcttcttggggacaatctctatttattgcttttttattcctgtgtttgggccatacatttgtatttcttggcatgtcttataattttttttttattaaaaactatactttttgtatgatttaatgtggcaactttgcaaatcagattgacatacctcccagagtttgtgttgttgctgtttgttgtagttgttctttgtttcattaatacattttcttagctagttctggaaagtctgtattccctgtcacgtgtgaccacttatagtctctgcttagcttagtgattagttaatgattgaacaaagatttccttaagcatttgtcaccaaaaaatctccccttctctgctaaggggctctgtgtgcgtgtgtgagcatgcctttacactcagccaggcagttgtcaactctgccttagtgtctgtgcagagatgaggtcagccagagagtttagggctttatcggttttcctgagcatgacacagctctgggcgtgcacacagctctatccatgcttgtgaccttctagactcccaggaatatgtcagatcttttcaaagccctgtggacacatcatgcttcagcttttccttttacttatttacttttgttgtttaaatgtaatagaagttgagcacagtggctcacgtctgtaatcctaacactttgagaagctgaggcgggaggatcgcctgcattcaggagtttgaaactagcctgtgcagcatagtgagatcttgcctttaaagagagagagagagagagagaggagagagagagaggagagagagaggaagggggaaggagggagggagggagagagagagagagagagaaagaaagaaaatagggacagggtcttgctatgttgaccaggttggttgtgaactcctggcctcaagcagtcctgcctcagcctcccaaagtacaggcgtgagccactgtactcggcccagcttttccttttaagcttttcggtaggtctattcctttccccacctgttatccactgcctcaggaagctgcaaagttagtcagttgcctgcaattacaccctgatgaaaagacttttcacaccaggcaaaggctgaaccaagtcaattacagccaaccttgcaagaggagccttatcagggaaccaccagaccggtcagataatgacagttctttgggcatgagacttgaaaggagctccagcctcattctgctccctcttgtggcgccaggctgctgtttttcatcaggagtgcagaatgtgaattttcaaggccaccacggaactgcagagtgtgcgatcttaactagggcaagtgaaaatgccactgttcttaccaagattctgctgtttttcttgaataaacattctcccgactgccctaagcctctggctaatttccagagttctgaaaaagttgattctgaccatttttgccagttttctcactgctattatggaggagagaatttttggaggtccttacttcacggattttgctgatggcacacctggaaaactgatttttgtttgtttgtttctttgagacagagtctcgctgtgtcacctaggctggagtgcaatgtcacgatcttggctcactgcaagctccgcctcccaggttcatgccattctcctgcctcagcctcccgagtagctgggactacaggtgcccgccaccacgcccagctaatgttttgtattttttttttttagtagagacggggtttcactgtgttagccaggatggtcttgatctcttgacctcgtgatctgcctgcctcggcctcccaaagtgctgggattacaggcatgagccaccgtgcccagactttttttttttttttttgagacagggtcttgctctgtcacccaggctggagtacagtggtgtgatctcagctcactgccacctccgcctcctgggttcaagcgatcctcctgcctcagcctccccagaggctggtgcatgccaccacgcctggctaatttttgtatttttaatagaaacagagttttgtcatgttggccaggctgttctcaaactcctggcctcaagtgatccacccaccttgacctcccaaagtgctgggattacaggcgtgagccaccaagcccagcccaaactgcttttttttttttttaatctccagtgagatcagaagtcacctgcctgggttggctctgaatgtccctacctgctctgttcccctgaacctggagtcgccagacacccaacccatgactacacccaggccagtcttgaccctgggcgtaaaaagcattccccactcctctctgctctgtatgttcttatacttttgctgcttcttcgggagtgggagccaggatggctgagaaactcctcctctgaagctgtctgtagtcagctgcttcctaaggccccgatctccctctcagacctgctgcctcctgcccaggggagctttcagattatggaatagacccgggctcccataaacgtccctgccaaactatctgggtgccagagctctaaaagactgaggcagagccactttgccatgattaattcaagagccttgactcagtcattattcataacctctttcagtggtttttcatgccagctcataccagcccagactctggtgctccgctgctccaagaagggcccctctagggccatgtgggacccagtgggacctactcttgagcactgctttgccaaagtagaacaggcttatcttttatttttatttatttttattttttgttttgtttttgagacagccttgctttgttgcccaggctggagtgcaatggcatgatctcagctcactgcaacatctgcctcccaggtgcgagtgattctcatgcctcagcctcctgagaagctgggattacaggtgcctgccaccacgcccagctaatttttttgtgtttttagtaaagatggggtttcatcatgttggccaggctggtcttgaactcctgaccacaagtgatccacctgcctcagcctcccaaagtgctgggattacaggtgtgagccaccaggcctggcctatttttattttttgagacagggtcttgctctgtcacccaggctggggtgtagtggcacgatcatggctcactgcagcctcaacctcccaggctcaagcaattctcccacctcagcctcccgagtagcaggcagcctcccgagtaacagcctcccgagtagcatgtgccaccatgcccagctaggttttaaattttttgtagagacggggtctcactatgttgcccaagctgctcttggattcctgggctcaagcaatccttttgcctcggcctcctaatgcgctaggattacaagcatgagccactgtgcttggctgagcaggcgtatctaagaaaacatatttctgggccagctgagttcagggaaaatgccttgaacttggagaaatactaagtcaaagcttacgagctaagtacttttgttattttacaaaacggcctttcctagaaacagctctgagtgacagggtgagccctcattgtgcattcatgggaaaatggaaacgaaatctaacaggacaaaggacagataacctttccatctttcttggcaaagcactaataacagatcacagtaaaggctaaagctcctctgtgagtttctttccaacagaggcagcagaggtacaaaggataagaggaaatgggctaatgtagcagagagattcacctaaatggagtctttccacgtgcttttccctacgttagggactcggctctcctctcgcctggctccctccatcctgaggctcatcttccatctcagctacctgtcacttcctccaggaggccttccctgaccaccctcatgtgttcccctgccactatgcctgtcctatccccagaggcttgcccagggccaagtgttgggtagggagtcaatgcctgggaggggctcaaggaactgaatgaagcttgcactctgggagtctctccagagagtctgtagaggctggtaggaaactcaggctgatttgaaccaagccctgattctagaaaaccacatacctgccaaaccagaagcagcagccccctctctcccctgctccctgccctaaggaaggaagcctgtgcccccttccactccttcttcatctccttcctcaccagcctgctgggacacccgaaagggcagcctggtggcggagctatccaccattgagtccagccaccgagaccctgtgtatggcaccatctggctgcagtcgaagacgggcaccgagtgcttctcagcttccacggatgggcaggtacccaccagccagacactggagagaggagggaagggaggggcagtaactgttccctggttccccatcagaacccctggggacatttcctttaacacattttattttgagatggagtttcactcttgttgcccaggctggagtgcaatggcacgatcttggttcactgcaacctctgcctcccgggttcaagcaattctcctgcctcagcctcccaagtagctgggattacaggcgcctgccactatgcctggttaattttttatttttagtagagatggtgcttcactatgttggccaggctggtctcgaactctgacctcaggtgatccacccgccttggcctcccaaagtggtgggattacaggcatgagccactgcgcccagcctaacactttatttttaagttgagtagtgataatacatgcccacggaacagaatctaaagggtgcaaaaaagaaaatgccttcctctcacctctgcctgcacctcctcccctccctccctctcttatgtctgccttcagagctagtctctgcgtatgcaaggaaacacacctctctcttctttactctttctttttgcacacttcacacactattctgtactcgatgttttccattgtgtgtaccttggagatagtttcatatttcatacaccgctgccccatgcctattaataactgcatcatgtgggtgtaccataatttatatatggattctaatattttgttgctaccccccaaaaaatacagcaaagagcatctttatacacagattgttgcacacatgcggggatatatctacagcagacattgctggcagtgggacttctaggtcggagcacacatgcatttttaacattgccggatattgccttattgtggggagtcttggcatataccgattcttggccttgcacctggaggttttgattcagtaggtcgagggcgaggcctcagcatctgggttgtatgaagcttgccggcgactctgatgatcagccaggtgtgggaactgtggacagaacagcaatcctcaaagtgtatttgctcccacgaattgccgggagctccatcctttgtggcccagtggctgaccccaggacggtggggtgagggcggagaaggcaaaagccaggggaaatacagggcctcgaagtctcactgtcgcccctcctcccaccaggtcatgtggtgggacatccgaaagatgagcgagcccactgaagttgtgatcttggacatcaccaagaaggaacagttggaaaatgccttgggggccatctccctggagttcgaatctactttggtgagtgtcccttgctgtcccttccccgacttgcattgacagggcagccagggctaaagacaggccattgctaggatatcaggtgctcgtggaacccagcaccagcccagggaggccaccctcactgcagccatcctagacgtgtgtggcctttacaacaactttccagcagggggcagcagagcttctcgaagaaggacaccatagtcatcatggcaccaagtcatcttttggccagtggcccagctgaacacagagggcaatcttttgacagaacaattccagaaaagccctgttttgtggggaaggtcacgcccaggaccaacatcgggaggcctggactccaacccaggtcctggccctgcctggcacggggtccctaggctggtcacctgccttcctctggggaaggaagaggtactggagaggaaaatgaggtcaaagcaggctccttggaaaaccagagcacaagcatggtctcggtgttcagtcactgagaatgacaaagaaatatcaaagttcaggtcgggcagggtggctcacgcctgtaatcccagcactttgggaggccaagaatttaagaccagcctgggtacataatgagaccccccccaccgcccgcccagtctttaccaagaaagaaagaaagaaagagagggagagagagggaaagaaaaggaaagaaggaaggaaagaaggaaggaaggaaggaaggaaggaaggaaggaaggaaggaaggaaagaaggaaggaaggaaggaaggaaggaaggaaggaaggaaggaaggaaggaaggaaagaaggaaggaaggaaggaaggaaggaaggaaggaaggaaggaaggaaagaaggaaggaaagaaggaaggaaggaaggaaggaaggaaggaaggaaggaaggaaagaaggaaggaaggaaggaaggaaggaaggaaggaaggaaggaaggaaggaaagaaaaagaagaaaaatatcaatgtgaggcaaggcgccgtggctcacacctgtaatcccagcactttgggaggctgaggtggcaggatcacttgagcccagcagttcaagaccagcctggacaacatagcaagacactgtccctacataagaaaagaaaaaaagggccaggcacggtggctcacacctgtaatcccagcactttgggaggccaaggcgggcggatcacctgaggttgggagttcgaggccagcctgaccaatatggagaaaccccatctctactaaaaatacaaaattagctgggcgtggaggcgcacgcctgtaatcccagctactcgggaggctgaggcaggagaattgcttgaacctgggaggcgggggttgcggtgagccaagatcgcatcattgcactccagcctggacgacaagagcgaaactccatctcaaaaaaaaaacaaagaaaagaaaaacaggaaatatcagtttgagcatagtgcaaatgtgttagaggagggaagcttcctagaagcagtaaaggaagacttcctcgctagagtaagaagacaactttcccttgttgttggcttttggtttgggctgagtcttggtttacgtcttagtgcagcccaggcctggttcccccttgggggtgtcacttgtttgcttcggggtcatgggccatcattcctagggctttgggaggccctggcctcgaacatacctgggcaaccctagctcaaggctgagagatgaatgttgatggaaggaggagacaattccactgaccccctccccagaggacaaggcactgggcagggaggttggggtggcgagggctcaggaaaacattctgtcccagaggcaaggctttctaggccaagtgctagacatgcagccacatcactactagggccatctcctccatgcctggcccttgcagggtgcacactgtgtgttggacacttgtggctgcctgatttaataagcttgtgcagtcgcctacaaccatctcgtggggtaatgttattatccgtacttgccagacacacacgatgagtcttcatgagattaggttgtgagtcctagtacctggtaaagctgggactcaaacccagggctccaactctgaggcccagagtgtccacctgcagcccaccatgaagtctgaggctagaggcacgatgggccactcagatctgggtggcctttctctctggctcactgacgggcggcgtgcagtcggcttgaatactttcttctctggacctctcaagcttggtctttccacttgcccttgacgcccaacttgaagcccaggtttttgttttgttttgttgagacatcgttttgctctgttgcccatgctggagtgcagttgtgtaatctcagcttactgcaacatccacctcctgggctcaagcctcagcctcttgagcagctgggaccacaggcacatgccaccaagccaggctgattttttttttttttttgagacagagtctcactcttgcccaggctggagtgcagtgacatgatcttggctcgctgcaacctctgcctcccaggttcaagtgattctcgtgcctcaaccaccacacctggccatgttctgggtattttctagagattttatatttatcattttagtaattttctggtagaagaaaactgcataataaaacaatatgttttttaaaaaaataaaaataaaaaagctggggggccaggtgcagtggctcaggtctgtaatcccagcactttgggaagccgatgtgtgcagatcacttgagcttaggagtttgagaccagtctggacaacatagggagactccatctctacaaaaatacaaaaattagctgaccctggtggtgtgtgcttgtggtccctacgtgggaggctgaggtgggagtactgcttgagcccagaaggtcaaggatgcagtgagctgagatcgcactgctgcactccagcctgggcaatggagccagaacctgtctcgagaaataaataaataaactaggagttcttttttcttttcttttcttttttctttttcttttttcttttttttttttttttttttttttttgaggtagggccttgctctgtaggccaggctggagtgcagtggcatgatctcggctcactgcaacctctgcctaaaacctgggagttctataggggcaggttcaccagctgcagaggacatctgagcccgttgacaaaggccctcccctcagtgtgcccctcccctacctcactcagctgttctttccatttggaatgctgaggacacagcaccattgtaggctcaggccctgctggtggaggttgttcagtctagcccagaagttaagacagaacagtaaacaaggaagggcattgcgtgatggagggggtcatgctcagagacgcgaggggagcactggaccaggagtcaggagaccagcctttgtgcattcagtccgcagtgaagtgaataactactaaagctcagttcgtgggcgatggacccatgtcagacaagctcgtgcccctcaaagagctcacccaccagtggtagggggacgagttacatcaccgactgccaggtaacttcctgagtgctggttggtcacctgctctgagttctcagggacaccagcctggacaatgctatgacaaatgtcactgtcttgccagggaaggctctgcccatcccatgagtgatctgggtgggccaccctgcatcccctccctgggtcttctttactctctctgtaaacaaacattcaggatctttatggccaaatgcatcgaggacacagtggtgctctgcagagggggctagtgacctgacaaccctccaggactggaggagccagggagggcttcattcagcacaggctccttgagcagcttccaaaaagatggggtctgaggagcccgggaagagtggggactgctctccaggaggggccacagcccttgccaaggcttgatctgagggcctttctagcgcctgcagaccccccaagcaagctcctgtccatgcccgctaatcccagaattgatggttcgtggagtcttcccctcctgtgtcactccttccacagcccaccaagttcatggtggggaccgagcagggcatcgtcatctcctgcaaccgcaaggccaagacgtcagctgaaaagattgtgtgcaccttcccgggccatcatggccccatctacgccctccagagaaaccccttctacccgaagaacttcctgacggttggcgactggacagcccgcatttggtctgaagacagccgggaatcgtccatcatgtggaccaagtaagaggcgatgctggggacaggaggggatgcaggagacaggaggggatggagggagcccagctgggccccggagagtcccgagcctccatatgtaaaatggagaaaaacctttccacaaacacccgagctcgtgttagcaagtgacttgctccagccactccacaaagtgataagcttcaaacactcagttactaaaaataatggccatggcttaattttatttccttttttttttttttttttttttgagacagtctcgcttagttccccagactgagtgcagtggcgtgatctcggctcactgcagcctccacctcccaggttcaagagactctcctgcctcagcctcctgagtagctgggactacaagcacctgccaccatgcccaactaatttttgtatttttagtagagatgggattttgccacgttggccaggctggtcttgaactcctgacctcaggtgatctgcccacctcggcctcccaaagcgttgggattacaggtgtgagccaccgcgtctggctggcttaattttcataatcctcaaactatccccaggaggaggcagcattgctcttctcttcatctcatttttcatgttagggaactgggctacagaaaggccaagccacttgctcctgctctcccagctagtgaggagccgagattgggtgtgaaccaaggaagcttggctgggaaatgcgggtgccttggcacaattcagcagtgaggcatagcctgtcttgctcagtgccactcctctgaggagagcaacagacagggagcttgagacagagctatgagcacaatggttagaccagagaagcttagactatcacatccccctccattcttcttagggcccatttaccttgtctaaaagtgccctttctcctcctccccttcatctcctaaattaggtaataagcccgaattctaaccacccccttgagtcattcaccaccgagcactgccatgtgtattgtgcattgcatgtataaataattacttttttctcttgctaaaaaaaacatcctggggttcctttcctgcccacagaaccacagactcctgcaacgtcaaagccaccagcaaccctaatgagcatctttggttccagtgcttcccaaatctggttgcatcagaatatcttgggaggagtttttgtttgtttgttaaaatgcttttgagatggagtcttactctgtcacccaggctgaagtgcaatggcgagatctcggctcactgcaacctccacctcccgagttcatgcgattctcctgccttatcctcctgagtagctgggattacaggcgcacgccagcacacccagctaatttttgtatttttagtatagacagagtttccccatgttggccaggctggtctcaaactcctgacctcaggtgattcgcctgcctcagcctcccgaagggctgggattacaggcatgagccaccgtgcctggtggaggagtgatttttttaaaatccagattctcagccccaaccctgggggtactaacatagaatcttgggcttagcccaggaatgggtttgctaaggagcaaccccaggcttgtgactcagccagtccttgctttgggagcagaaacctggttcgatgtcctcattctacaggggtgggaacgctggctgacaagggcagtgcattgttccaggcctcatagcaagtagggggttcccagtagatgtgaagccctttacaggctttaggagccttcccaatgtcttcaggtcctgcaggctgccagggctgtgtgaaaggagcagggtgtcgagcacagcacccataggcctttcgcagggctggttcctagagggacttggtggacctgtgtcgtagaacctgggtctcccttgtcctcctcctgcataaggttaaacaaatttagcaaataagaatatttgaccctgggccaggtgcagtgggctaatgcctgtaatcccagcactttgggaggctgaggcgggaggatcacttgaggtcaggagttcaagacgagcctggccaatatggtgaatccccatctctaataaaaatacaaaaaatcagctgggcttggtggctaacgcctgtaatcccagcactttgggaggccgaggcgggtggatcacctgagatcaggagttcaagaccagccgagattgcgccactgcactccagcctgggcgacagagtgagactccgtctcaaaaaaaaataatatttggcacttagttaaatctgaattttaaaaaaaaaaactattttttttttagtataagtatgtcccatgcaatatttggtatatacttatactaaaaattattcattgtccaaaaatctccagatgtttctttttttggggggatgaagtctctttgttgcccaggctggagtgcagtggcacgatcttggctcactacaaccttcacctcctgggttcaagcaattcttctgcctcagcctcctgagtagctgggattacaggcgcccaccaacacccctggataatttttttatttttagtagaggcagggttctgccatgttggccaggctgatctcaaactcctgacctcaggtgatccaccattctcggcctcccaaagtcctgggatgacaggcatgagccaccgcgcccggcccagatcctttctttagtcttgatcatttctcccactgtggtctggctgtcaacacactaggtttgcaaaggtgactgggaagtgtagtctgccttgctcaccaggggcccagctacaactatattgcaatggaggaagggagaggaggtctgggtgaaaatctgaaggctgcactgtgtgtgtgtcccttttaaaaaaatgttccgtcttcactgaagaaactcttgaaaacccagatgaaaccaagtaggaagtgacactctccttatctcagcggtagcagcttttctgggcatgtccttcctctgactcccatccgtgagtcccagggctgggaccaggtccagcaacacgtgcctgctgcctggagttagcagcagagaaatgccagtggccagcccacgggaaggactgtgcccagagccctttctttattttatttgagacagggtctcactacgttgcccaggctggagtacagtggcacaaacatggctcactgcagcctcgacctcctgggctcaagcgatcctcccatctcagcctcccgaggagctgggaccacaggtgctcaccaccacacccggctaatttttttattttttgtagaaacagggtctttccatgttgtccaggctggtctcaaaatcctggcttcaagcgatcttcctgccttggcctcccaaagtgctgggattacaggcacatgaccagcccagagccctttaaagaacagcctgtcagacacctgaggtcaagagtttgagagcagcctggccaacatggtgaaaccccatctctagcaaaaataaaatattagctgggtgtggtgacgggcgccagtaatcccagttactcgggaggctgagacaggagaattgcttgaacccaggaggcagagattgcagtgagccgacatcgtaccactgcactccagcctgggcaacagagcaagagtgtctcaaaaaaaaaaaaaaaaaaagcaacctgtgagctgtggatgagtgaggtcagcacagctagaagtcagacacaaggaagaacttcctacctagcaagactctgagatcctggagcccagaagggaccaagtgagccaagctgtggctcagaagcctctgtccctccaaccatgatgtggtctacctcccacaggtaccacatggcttacctcactgatgctgcctggagccccgtgaggccgaccgttttctttaccaccaggatggacggaaccctggatatctgggacttcatgttcgagcagtgcgatcccaccctcagcttgaaggtcacgcgcatgtccctccttgtgcatccaggtcctcagggagccaggtcccggcgtgggtgtgagtgtggggtgctgtgagcacgtgtgcagtgtgtggccaggtgtgtttgggcctctgtgggggagccgtgtgcaggctgactgcagcgattgcttttgagcgtgtgctcctacaaaggttaaggggcctgggggatttggcatcctggtagcacaacagaaccacctgggggaaatttaaaaagaaacaaaagcaggtacccggcatctcctacccacaggccgattccttcagagcccctggggtttggctgctggaccttccccttcatgtcagggtggccagagctgagccccactggctggggccacggaagggtgggggcattggggaaccacagggtgactgtgaggcggaactgaaggggtggggcgggagatgaggcagggaagccaggagccttgacaaccagtctccgagtttgaacttcatcctgtgggcagaggcgtcctgaggatgtttgaatagggccaagtggctgagcctccccaggggccagttaatcagacacacataactttgctcctctctcctctacctgggtctgcccggccccttcaataggtgtgtgacgaggccctcttctgcctccgggtgcaggacaatgggtgtctcatcgcctgcggctcccagctggggacaaccaccctgctggaggtctcgcctgggctctctaccctccagaggaatgagaagaacgtagcctcttccgtaagcaccgggtgcctggggaaaatccctccagcacgtcccgacctggccccacagcagagcaggctagtcagacaaatagatggccccgccctcccacccccagaacataggtgcacattttgggggaagcagtgtgggctccataaataggtgttggtgtgtccatttgcctttgctcaactgctgggtagctaagtggccttcagtaagtcacgtcactctccaggattcagttttttacctgtaaatcaaagaggttcgacttggtcagtttgtctagtttcaaataacacttttttttttttgtggaaactttccaatgaaggcttagtattgtattatattatattgtattttaatttaattatttttatttatttatttatttttgagacaaagtcacgctctgttgcccaggctggagtgcaatggtgagatctaggctcactgcaatctctgcttcccaggttcaagtgattctcctgcctcagcctcctgagtacctgggattacaagtgcataccaccacgcccagctaatttttgtatttttaatagagacaggatctcaccatactggccaggctggtcttgaactcttgaccttaagatgatctgcccaccctggcctccgaaagtgctgggattataggcgtgagccaccgtgcccagcctaattattttatttatttttattttatcagtttattttattttacttcattttgagacagggtcttgctttgttgcccaggctggagtgcagtggcacaatcatggcccactgcagcctctacctcccaggctgaatcggtcctcccacctcagcctcctgagttgctgggaccacaggcatgcaccaccatgcctggctcattttttaatttttgtagagacagggtctccttatgttgcccaggctggtctgaaactccagggctcaagcaatccttccacctcagcctcccaaactgctgggattataggcatgagccaccacgcccagcctgaagacttagtagaatgctaatagggaagccagatagaaggggacttgaagagggggactgagatccattcctacatcctttccccagtggacagccctgcaggcaaccccccagaaccatggggaacactgtggaactgaaaacccctagtgctagggccgggtgtggtggctcacgcctgtaatcccagcactttgggaggccgaggcgggcagatcacctgaggtcgggagttcgagaccagcctgaccaacatgaagaaacctcgtctctactaaaaatagaaaattagccaggcatggcgtcacatgcctgtaatcccagctccttgagaggctgaggcaggagaattgcttgaacgtgggaagcagaggttgtggtgagccgagatcgtgccattgcattccagcctgggcaacaagagtgaaactctgtctcaaaaacaaaacaaaacaaaaaaggaaaacccctagtgctgaggcctggagagcctcctggctctgcctgagactgggatctcaccattgagctggtccttgttgggccaaagccgccatatttcatagctccaaagggcgctcttctgcctgtggttctggaactccatgctccttggcattgagtaactcagtgtccctgctgcagccttccaaccccaatattcagccctccttccttgacaccagccctgggtacagacctctacagtacagggactgtatggagagcaaggagagctcagcagaagccccacctggccccagcactggagtcgcttgccatcctgccctctccccaccgggctctctctgtccctgggtgcccagatgtttgagcgtgagacccggcgagagaagatcctggaggccaggcaccgggagatgcggctgaaggagaagggtaaggcggagggcagggatgaggagcagaccgatgaggagctggccgtagacctggaggcgctggtcagcaaggccgaggaggagttcttcgacatcatcttcgcagagctgaagaagaaggaggcagacgccataaagctgacgccagtgcctgtaggggcctggacaggggttgggtgggttggggactgggcgggacacatggcacttgggttctgcttctgcttgccgacttcctgggtgaccttgagcaagtagtcttacctgctagatcttaatttattcacctggcaagtgggaagaattattcccttccttccaaagcatcccaagtctccaaacagacttcaggctccttacaggcaggaaccatactccatgcctcctggtatcctcccctccccccagagagggcacatggtgaaaatgcgtgttgagtgactgaacgagggaacatgtgtgttgagtgactgaacgagggtcctagaggtaagtgagctgtcagagaggaatgggccttgagacccctggagggaagggctgggacattagcggtgtgcacgtcatgctggcttacccaggtttggtgtcaggagtgtgacctgtggtcagctcatctgcccatggccccagctctaaagcactttctagctgtatcacctgagctggtcgcttcacttctggcttccttcatttccatctggaaaatgaggagatgttgctataaagatggtgtctggtcatcttccaggccctcttttgtaccagcggagagaggaagaaaagacattgcctgtctgggtcacctccttcaggccccacagataagatgccaagatatgaaagagccaaagagcagcgtggaagggaaaagaaacagcgggtatatgccaggatttacccttgtaggcaagactggctgcagacttggggattgcaggcactgcaaaatgaaaatgtgagggccctcgtttaaaaagtattaataattttaaaacagtgacaatagagcgttaaaccaagcgtgggccctgctgagacagggtccagtgtatctgcacagagcacccacccatgacgcctgcttgaagaagagctgtatggcaagttcttggtccctgatagagtggacagagcgaaggatggtgcatgagcacacagggaagataactggttccatcttgtgatttcttccctcttctgcctccctccccctgggtctaaagctgtgatttccacaggtgcattttgcatttgggggtacttggttatgagatgttttcttctcacactgggtaatacaggtggggcagagagctccctccacttctggtggaggcaaaactagaatcctggattctgacgcctaatccagggctcctcccactcaccactcctggcctatccagccctgcagaaggcaaagatgacactggccaccttttacaacgcaatggtggctggtaggcaccatgctttgtgacatatgtcccaaaacgtgctcctcaccatggcttgaacattctacatgaagaagttgagccttggaaggggttcaggttcacagaacttggccccttcctcctcctgcctgccacacacttcctgtctctctcttagtctgcaattggcccaaaacgctggtggtcacaaagtaccgcgtggtactgaagctgttttacataggctgggtccttatgcccactatttctaatcctggccacagccctgcaaggtgtcctgtcctctctatgggtgagggggccaaggagactcaggaggagctagcccgaggcctcccagtctgcatgtggcagaagccaggcgtgaacccaagtctgccagattcccccagctctgcccactttccgcactgtctgggccctcaccagccgcagagctggcacccgggttccagggtgctcagcgacccaggcttcagccatttggctgctttggtcctcgtggggttcacatcccaggggagtggggaaggcctgtcccctaccaacaccaacacttctgtgctgtcttcccctgcagcagcaaccaagtccagaagaagaccaggtggtggaggagggagaggaagcagcgggggaagaaggggatgaagaagtggaagaagacttagcctagaagtcagccttcgactgcggcgctatccctgtgtgccttcctttcccacctcttggtattgccccgctctcacaagtgggaggctgagctccgccttaaagcagcactgggtggtgggctgggagcatcgggccctgactccccagcccctacaaatcactagcccccactgactcactgggcactgagtcctgagccaccccttggagagagggaaggggcggggcttgtcccggagctggctgccccattgtctcagccaccctgagcccaccccaaggccgaggccaccttagtcctagtcctggatgtctcctgggattcagcttctcacaggctccccagcaatcattttcgtttgtaaccttgcagaccctcaaccagacttgcatggccatggcagggcctcgggaagaccttcaggagtggggaagggtttctcctccatgatcgaccctcctcgtccacctacaaatcaggaacagaaagtctgtccactttgaaaatacctttccaggcagctccctgaccatttggacacattgccacgacaggagcctccaagtatgtgggaggggacgggcgggacgagcttggctgttctgctgcacctgaatgctttctgttatcctaattcttgtaaaattaaatgaatcgtaacaatgccacgagttagtacgtgtgatgcatcctgcacccagagcctgtcacgttatctcgtgtaactcattcacgacatccctggaactgtgtgctcccatcacctttatactacacaggaggttccaggagcggtacagggacgtgcccaagtctcagaactcgtgacggggcacagcggggacgggagcccaggcagctcattcctgaccctgcacggtcatcaactgtgggccaggtgctgtgcaggcctctcggggactccagggtgggaagtgggctgccctgggggtgccctgaaaccgcagctcaacagagcagtcagtgaccattaccagagacattgggaggtcgagagggcacttcagtgccaaccttgcacaaggaacaatgccctgaccatcatcatcctgtggatggcaggtgaccttggcagggacccaaagtgcccttgaaaaatgcccttgaaaaatgtgttggtcaggtttcgtggctcacgcctgtaatctgagcactttgggaggccaagacaggaggatcacttgagcccaggagtcaaggaggatcacctgagaccagcttggacagcatagtgagacccccatctctaatttagaaaaagaaagaaaaatggccatgttaagaatctccttggctgggtgcagtggctcacacctgtaatcccagtactttgggaggccaaggtgggaggatcacttaagcccaggagttcgagaccagtgtgggcaacatggggaaaccccatctctataaaaaatacaaaaattagcctggtgtggtggcgcaccactgtaattccagctactcaggaggctgaggtgggaagatgacttgagcccaggagctcgagactacggtgagccacaatcgcaccactgccctccagcctgggcaacggagcaaggccctgtcttgaaaacaaaataaaatggccaggcgcggtggctcacgcctgtaatcccagcactttgggaggctgaggcgggtatatcacctgaggtcaggagttcaagactagcctggccaaaatggtgaaaccctgtctctactaaaaatacaaaaaacttagccaggtttaatggcacatgcctgtagccccagctactcgggaggctgaggcaggaggatcacttgaacctgggaggcagaggctgcagtgagccgagatcatgccattgcactccagcctgggcgataagagtgaaactccatctcaaaaataaataaataaaataaaataatctccttgaggagggacccagggccagctgccccccgtactcaaagagaaaaatggagctgtcgactgtggttaaccttgataaaaacaataattcaggttatgctgagtgcttgatcttcacaagtgccccaggagtgatctcacatttcaatccccacgttatggatgtagcaggcgagagagagagagggagtaacttgctgagtccagtgggagtgggtagcagagctgagacttcagcccagagtcacagccctacagcttacgccatgcacactgcactcccaggacccgggtaagaggagtgggctgggccattccagcatcagacggagggggccacgagggagcagcaggcccctcgctgagcagggacacacacagcctcagtgccgtcctcaggaacgccctgcctagagcagcgattctctactggggaagattttgcccccaacaggacatctgtcaatgtctggggacaaccggtgaggagagtgcttctggcattgagtgggtagagacagggaccctgctcagcatcctgcacacaggacagccccctacattttggacagtggagtcatgctagagaggcccaatttagagaaaaatctacccaaatggagcatcccaagagaaagtacaggctctgcacacactaacctgagcacaccgaaggcccctgtgagaggctggcaccatgagctcgaaggcaggaggaccttctttcactgaactggaattttgacctttggcttgtgcctgcaaaaggaggctgcctgatggaatcagcaggtcccttgtgggtgcagagaacgccactgggcagggacagcatttgaagaggcatttgaggagtggccgtggaagaggaaaggagagccccacagacggcacccggcaaagggcagcacgagctcagcgggtgcggtgccaatgctgccaacccgtacgatgaccttcactgacctctcacgctggcctcaccaggaatctgttgtttagtcccttcctaagaggaggcaaaccaaaccacgaggcatcactggggcgccagaggtgcctggaaaaacccaccccgtgggtgtggactgtgcactgggaccacgctggagccggtttgggaagtgcggaagcagcggccggactcaagtgtccacagcacagtgacgtccttcctgtccgtgccacccggaaaagggggtgcttccttggcctcttttgctcagctgacttaatgaatgcaccgcttaaccaaagatgcttccactgtgaccacaacagcccagtggctcttgggagaatcactgtcccctttccccaccgtgtggctgctggggactgtaggccccaaggcaggactctgaggagggaccccctgccctttataagtaacaaaattaagtgtttcccgggtcccagaggcccctgagatgttactgatgcccaagtaggaggcaaaggtgactgctggcctgacgcagtggctcacacatataatctcagcactttggaaggccaaggcaggaggatcacttgagcctaggagttcaagaccagcctgggcaaactaaggagacctcatctttattatgtatatgtatgtatgtatatatatatatataattttttttttttttgcaacggagtttccctcttgttgtccaggctggagtgcaatggcatgatctcagctcactgcaacctctgcctcccaggttcaagtgattctcctgcctcagcctctcaagtagctgggactacagatgccagccaccacgcctggctaattttgtattattagtagagacggggtttcaccatgttggccaggctggtctcaaactcctgacctcaagtgatccacccgcctaggcctcccaaagtgctgggattacaggcatgagccgtcgtgctcggcctattaaaaacttttttaagtgactactgatggcctaccagggtcagcatccagagaccccccagccagcctctctgtgtgctgacgtcctggggacgcctgcagcactggtgggaagtgtagatagaggcagtgttttcacggcatttccaggcagggaagtctgaacccagctcaggcgcttgccatccgggtaacgttgcctacactcagccctgtgccaggcacttgccatgagtggagaataaaccagatgcaggccccgcctcccagagccggtacaccagtgggaggcagggaaagctgatagataggcagatacctacagaacgacagttgtgcaaagtgcatgttaaggaagagtacagggtgccgtgagagggataacaggaagaactaacctagactctagagaagaaggagctggccaggaggcctccatgagaaagggacaatgcagctgagaccttaagaacaagcatgagcagagatgtgtgtacacgtgcgagtgcatctgtgtgcatgtgtgatgacgtgcgcatctgtgtggaggggcaccccaggcagggcagctgcacacacaattccggaaggaggaaagaagccggtgctgctctgttagaccaacagggagtcatcagtgtgaccggagtgagtaagggctagagcctggaaccagccagcgacagcaagagtctgctggggcaggtcttgatgtcaaggattttgaccttgctccaaagatcactgagaagcacgggtgcggcttgatgaagcctttgctggtggagggaggcctggagggaggcacctgggggtcggttgggagcacattgtggtgtcaggcaaaagagatggcagcttggagtggggcgatggccacgaaattacttacctctctgcacctctgctatctaccttcaggaattgtttgggtgagtaaatgaaataacacactagccactgggttcaaaataagtgctcaataaacgcctatcacctccctcacttagaagcatctgacgaccacctgggacaggcctcatggctggtggcaagttctaggttagtacaaggagctactagaatgacttgtgaatttgtttcttggggtcctttcagcatctgcaccccaaatttggaagaggatgctggggcttaagagaaaagtcctcaatccatgctttgttttcccaataactctcttccatttcccctcccaagtcgtacctccaggagccaagcctgggagtagccatgcccagaacacaaggaggtgggactttgcccaggttgccctagagctctagagggccaacgggctttagaaagggcttatcaaaaccagtggcttccaactacaggtgggtttggggggaaatggagaatgtcatatatctctgattgaaaaaatcaggccgggcacggtggctgacacctgtaatcctaacactttgggaagccgaggtgggcggatcacctgaggtcaggagttcgagaccaacctggccaaaatggtgaaaccctgtctgtactaaaaatacaaaaattagttggccgtgatggcacatgcctttaatcccagatactcgggaggctgaggcaggtgaattgcttgaacccaggaggcagaggttgcagtgagccgagatcgcaccattgttctccagcctggatgacagagcaagactccgtctcaaaaaaaaaaaaaaaaatcattgctacttggagatggtcaccgatgccatctacacttgctttggcagcaacagccttcttattaagcaagagaagttttgcccattggagggctcacttcaggcaactcaatgaagatttcaatgagctcacaaaagcctgagcccaggtaggtttttagtaacctttaatgtatgcggtttgaccatgaacaggagttcctcagcatccctgagtcttaggaccctcataggtaaacaaaagattctagtgaagattaaccatgacaacacagattcagcacctaaagtggctaccagcagattgcaggtgcatactaaaccttagtttcctgggctgaggtgaagctgaagcggtaagtccccctttctttctttctttctctctctctttctctctctctctctctttctctctctctctctctttctctctttcttctttttttttttttttgacacagtcacgctctgttgcccaggctggagtgcagtggcacgatcataattcacttgcagcctcaacctcctgaactcaagtgatcctcccacctcagcctcctgagtagctgggactagcggtgtgcaccatcatgcctgacttccttatttatttatttatttatagagacagcagggtggtgggaacaggggcggtctccctatggtgcccaggctagtctcgaactctgagctcaagagatctttctgcctcggcctcccaaagtgttgggattataagcatgagccatcacatctggcctaaatcccttttctgatgagatgtcggctgtttccaaggatcttaaatgtctgcacgtgggtctaaatcaaatgctcctgctgtgtgtgggcaggtttgctcaagtagattttctcactcattcattgactaaactctcactagatactgtactggaaatatgaagttaagagccagcttggccggaggcaggtggctcacgtctataatcccagcactttgggaggccgaggcaggcagatcacttgaggccaggagtttgagaccagcctggccaacacagtgaaaccctgtccctactaaaaatagaaagaattagctgggcatggtggcgcatgcctgtaatcccggctactcgggaggctgggacatgagaatcacttgaatccaggaggcagaggtggtggtgagctgggacagtaccactgcactccagcctgggcgacagagccagcccctcagctcagacaaacggacagatggttctgatctccagttgtgagtgctgttacagagaagtatatagaaaaaaggacctgggccgagcgccgtggctcatgcctgtaataccaacactttgggaggctgaggcgggtggatctcttgaagccaggagtttgagaccagcctggccaacatgacgaaaccccatctctattaaaaatacaaaaattagccagcgtggtggcgccttcccgtaatcccagctcctcaagtggcagaggcataataagaattgcttgaacctgggaggcagaggttacaatgagctgagatcacgccactgcactccggcctgagtgacaaagcaagacagaggagagagagaggggcagagagagagagaccgatctaatccagtgggatgcaggctggcacccctgtatttgtcaggactcttggtcacatgtttaagaaacccattctagctaaagccaagaaagaatatttgttggctcaagaaacttggaagaccaaggctaacagcttcaggtgttgctggatctagcaactcagatgttgtcatttggtatctctctgcacagcttctttctttgcctcagttttatgaacttctgctttagtgaagctgctttcattggataaggggagggattagatatgaccccaccccccgattttagtcatttcagccagtaatcccaaaggcaggagagagctcctccctcccagtataacaaaattccagggaaaggctctgattggcctaatgtgggtcatagcccatccccttggaccaatcactgtgaccacagtcaagtctgggttgcatgccttctgccatggctgggagtggaacaggatgctgtgatgggctccatcagaatgacatggactagagaagaggcagttcccccaaggaaaggggaggtgacacataagatgagcttggaagaaggagttagccagatagataagtggaaatggaactccaggacagagtggcaggaacaaagcccagagaggagagaagagctgctcacgcagaggactgcacttggttgagcacggccagagcaagggtggtagaaggggacgagccaagaagaggcagggaaggctgcaactacaggctaaagagccgaccccaaacagaaggcaatggggcaccatggcaggatttcaagtaaggtcacgacacccatctgtcctagagcagtgagggaatggagtcaaactggaggcaaagagaccacgcagtgtacgtggtcatccagatgagaaactgaagtcccaggctgcaggcagcagtgatgggagtggagaggagggacagaaacgggttccagggcaggaccaggatgcagagcgcatggactgagcatacatcaagtgcctgggtctctgcccgtgcagggcttactttgattcaggctctgtcagggcataatgagagttctgtggaccaggagaggaggggtctgatatggaggatgacgagaaatttgacagaggtaagctggaaagggtgtaccaggttggaggactggcatgagcaaaggccccagtgtaggacctggctctagcatacatttgggaataagcaagtggtgaaggtgagtggaaggccgagcccacagagcagaatgagtttaaatgaagccgggcaggaggctgaaaggggttgtggagagtaaagtgtctgcctttacttctgtgttagagaacacaggaggtctctgcctgtcagatcgctcccctttcaaagatctctgcctgacagatctcttcccctttcaaaagtggggctggggccaggcacggtggctcacacctgtaatcccagcactttgggaggccaaggcaggtggatcacctgaggtccggagttcgagaccaacctggccaacatggtgaaacctcgtctctactaaaaatacaaaaattagtcaggcgtgatggtgggtgcttgtaatcccagctacttgggaggctgaggcaggagaatcgcttgaatccggaaggcggagattacagtgaaccaagattgcgccattgcactccagcctgagcgacagagctagacttcatctcaaaaaacaaacaaataacaacaacaaaaacggtggggccagggcatagcaagaggccatgacatggtccaggtgagaaggggtaaaaactggagcccagggaatggcaagagacgatgaagagaagaaatatttgcagaagtagaatctgcaggagttgaatgtagaagatgagaaaaaaagatgcggtaaaaaatgccttaaaggcaatgggtataaaggggatggtgggccgggcgcggtggctcacacctagaatcccagcactttgggaggctgaggcgggtggaccatgaggtcaggagatcgagaccattctggctaacacggtgaaaccccgtctctaccaaaaatacaaaaaattagccgggcgtggtggcgggcgcctgtagtcccagctactcgggaggctgaggcaggagaatggcgtgaacccgcgaggcggagcttgcagtgagccaagatcgcaccactgcactccagcctgggcgaaagagcaagactccgtctcaaaataaataaataaataaaataaaataaaggggatggtggtttaattgacaaaacccaaaagtcaggcagaggacattgtttgagaatatacctgactttgtgatgagtcttcgtgtaagatgggtggggacttgttacttaggagcttcttatttatttatgtatttatttatttattcttgagatggagtctcactctgacgcccagactggagtgcaatggcacgatctcagctcactgcaacctctgtcacctgggctcaagcaattctcctgcctcggcctcccgagtaggtgggattacaggtgcctgccaccatgcctggctaatttttgtatttttagtagagacggggtttcaccatttggacaggctggtcttgaactcctgacctcaactgatctgcccgcctttgcctcccaaactgctgggattacaggcatgagccactgcgcccagccaagaagcttcttatttttacccatcaatcgctataggcccagcgcagtggctcacatttgtaatcccagcactttgggagtctgaggcaggaggattgcttgagctcaggagtttgagaccctgcctctacaacaattaaaaaaaaaaaatgagccaggcgtgatggcatgcgcctgttgtcccagctactcccaaggctgagttaggagaatcgcttgagcccaggaggttgaggctacagtgagctgtgatggcaccactgcactctagcctgggccacagagtgagaccctgtcttgaggggtggggaggcagaagaaaaaaaaagagaaagagagaaagaccttgtctcaaaaatacaaaaacaaaaacaaaaaacaccccacaaaaacaaaaataactatggggcattctgggtgggactgatgcatgtggaggaacagaaaagaaaaagaaaaatagtgacagcccagttgaccaggggcctgtttgattgatccaaataggttcttttcaggagcctaaaatgcaagcacaacacacccctaaaacttacccgattctctttcgagaggctgaggtgggaggattgcttgagtccaggagttcaaaaccagcctggacagcacagtgagatccctgtctctacaaaatacaaaatgttagccaggcgtggtggtgcgcacctgtagtctcaactacttgtgaggctgaggcaggaggatcacttgagcctgagggattgaggctgcagtgagccatccatgatcgtgccattgtgcttctgcactccggcctgggtgacagagtgaaactctgtcataaaaaaacagaaacaaaaacaaaaaacccgacccgattcttgtcacagtatgcccatttgcaaactgtccagcctacagcctaggccaaggaacaggacaaaacctgggatcccgggcaggagagtttggtttccaccaagttttacttggtttatctatttattaaacccaaggctgacggctgcttcttgctgctgtttattaataacgattcccaacacaggctcctcaggggcagccggggaagccagtcccagggcacaggctggcatcacactctgcctctgagggaccccaggcagtctgaggcagccctggggacatgagtgcttcctttcccagccccttccctggaaagtgaaacccatcgtggcttcctctcccagtcttggggctgccgggctcagcttcggtgggggcagaggacacagaggatggacatcagaattgggagaggctccaacatcccccaggaaactgaggccccagggaggcaggaaaaaccagctccaggtggctggccgagttggaggcggaactgggaccagaatccaagttttcccagggcctcctgaggacaggaacctttcccctgtgttccctgggagtgcaaccgttgttattgtcgccaagaatggaggcggtagcgtcagacctagactttcttgcacagtattgtggctcttccagcagcaggcggggagccagcagggcacacggacccagccatcgtgacctagattctgggttcaggggtagagacttgtttgctagtgggtcgcactgagtcaggctcttctgtagcacaccccaggtaacagaggtgctgggcggcctgagcaaagggacaactttttgccacccatgccagtgggcagtgggtgcagacactcacagcacaggcacctgctgcgatgcacgcggcgcccacggaaacccgaggctgccagccgccgccctggagaccccagagacagcggcagatgcgtgtgcttcaaggggcagcgtggctgctggggcgctccctaaagggcagtggcacggggtcgcgccgcgagcagaggggcgcgggtgggcgcgcaggagttagcgaactgacacggaggcgccaggcggacgcacggacgcaccgagggccgcagggccgcacagccgggcacacatcgtcgcgcagcggttcaggctcgggggcctcctcggcggaggcggccaactctcaccctcagcgcggggaggggcgggcgccgggggcggggcggcgccgtccgggccctccccctgccccgcctcgggtcggcgtccttagccgctggcgcgttgttggtttcgggttgtcaggcagcgcgcgaggcggcgggcagctagcagctggcggacgcgacccggaggcggtgggggtgcggctgagccatgcccggtggcgcggcctgagcccctccacctgctgcaatcatgaaggacagcggggactccaaggaccagcaactcatggtgagacccttttagaccctcctccccaccccgctccgtggtctacttcagtcggcctccagcgacagagtcctgtcccctcgccgccaccccactgagaggacaggcaacgaccagggccgggactcttcagagcaactttccccaagtcctgcaggatgggtgtcaagaagggaccatggcctttttagactttcctgagcctgaaaattaccccaacttcaaccccacccccacctttccaccctcccattgggagatcccgcccccaaagcgtgcgcagatgaatctcggctctctcatccagaaacgccaggggcagggagggcttgacctaactgcccccagaaggagggtggcggtttcccagttaatcagaggctgctccagccctggtgaggtcaggagtttaaagggatgtgggggtcaccagtaggaagacaagggcccctggtgtcaggatggggcccggagtgcctggttcttgggctgcaacacggatgctgcccaagtccggattcgaagtagttcagagaagtgctagatgcagctaccatggccccacagagccctggggcctgggacagatggggaggtgagagtgggggctgtggaggggaaggtggaattcctgatcatcagtggtgcctgggccagagcaacaagggagatgactcagtgacctcgaggccaccactaggctgtgggtgggtgggtgtctctctcagcaagccccttcctcatcccctaatttttgaggtctggggaagggccctcatcaccagaaggtgggcagtaaggtaactggaggataatgttgctcccagagtcccctacctctcaagggtgggcttgcttctctgaaaggagcctcagctccagcccccaagcaagccctgggctctaggacatcctctctggctttttagaatgtgtctctttgaaaatcactggccttggcatgtattgtgtgccccggggagcagggatgaagggtcctcccctcccgccagtggaatttggctgaagatgccactaaaggtgacccgtcaggtagtgtagttccctctgaaagtgccttttgttttgttttgttttgtttttcttttttgagacggagtttcactttctcacccaggctggagtgaagtggtgcgatctcagctcactgcccctcaagttcaagcgattctcctgcttcagcctcccgagtagctgggataacaggcatgcaccaccacgcccagctaatttttgtatttttagtagagacggtgtttcgccgtgttggccaggctggtctcgaactcctgacctcaggatccgcccacctcggcctcctaaagtgctgggattacaggcgtgagccaccacgccaggcctgaaggagtcttcactcggccagagggccgttcattctatccccacacccagcagctgttgccctttgatcagcacaagacgtgctccccactccaccctgttctttagggagatccacgcacaggatgagacccatttcacactggctggaggacaggcagatgggggtgggcgctctaggtgacactctcctcggtgtaggaatgtggtcacaggctgttgggatgatgggggacattccctgctccatcccacctaccaggcctcatcccagagccgtgcctgcaccttcctctgcagcacgtcattcgcggaaacacagagaggctgctccagtgccagggccccaagttcaagcccaggggagctgcgagtgttttatttgggcgtgaggctgaggcaggctggaggagcagacagctctctcccctggggctctcccggaggccagggctcctggggagactcatcaactcagacacagtccaacactctgtggacctgctgccctctgacctaggtagagttttacttaggacaagggaggcctgagatggctgaatgctagagaagccaggggcttgcttgaggtctctctgaggcccagcatggtcctctccctctaatcccaggggcttggttttccctcccaggtggcgcttcgggtccggcccatcagcgtggcagagctggaggaaggagctaccctcatcgcccataaagtggatgagcaggtatgcagggctctgcagcaggagctgcagggcagaggtctgctcagatggctcagctcacctggtgagggcagaaagggcccctgtggcttgcagcaccctccttcctctactcactgaactcttggctgtgctgttgatgacatcaccaaggaagctgggggctcttcttccaggaagccttcctagattgatccaaggacaactgggagcttccctagcctgggtgggccctgatcctttacctttcacatgctcattgcttgactttcccaccctaatatgcctgctgcccacagagcacatatatatatggttgagagctaaagctcgcctctagggtgtaacgtgtggcaaaatcctcgctctctgtttgcaatcttggtcctcatgtcaccaggatgaggaaggcagggcacacgaggcaataagtgtgtatcaagtaccagcagcatgctgggtactgttctagaaactgggaaactgtggtgaacagaaaaggccctgtcctctctccattaccttaagtctagtgtgaagagatgaggcattcatcaaagaattgcatcacaaacaaacgagtttgcagctaacaagggcttcaaagaaatgcttagtggcatgagagtaggtaagaaggggataagacctaaacctggaggtcagcgagggcttccttaagaaactgtgcttgacactttgggaggccgaggaggccagatcacgaggtcaagagatcaagaccatcctggccaacatggtgaaacccagtctctactgaaaatacaaaaatttagctgggcgtggtggcacgtgcctgtagtcgcagctactcaggaagctgaggcaggataatcgcttaaacccaggaagtggaggttgcagtgagccgacatcacgccattgcactccagcctgggtgacagagtgggactctgtctcaaaaaaaaagagaaaaagagaaaaaaaaaaaaaaactgtgcttgagctgaaaacataaggggtgaagaagaggtcattagtagcatgcatgaggggagaaatgttgacctgaggggcttgcatgtgcaaagggcctgtggtgagagggactgggatgcaactgggtagctgagaaaaggccagagtggctcaagcaggagagtaaggggcaagaggtgtgaatgggctgggccaaaccacatactctgtagaccatggccaggatgtttgtttgggtaggcagttgaggactcgtgctgggatgtacacaggcacagtggtgggggcaacaggagtgggcttggtgcccaggtaggagcatcgtggtggtaggatgtgctaatggctcagagaagttgggtggcactgtacaatgcagagaaaggcacacgtgagcacctgatgggcctgggctcaggtcccacgggctggactcatgaagccctgggcccaggataagcaaaccagaggcagatggcacacttccaatgcctgtttacctctgggctccccaggggcaggggcccactcaagcctctttcttcagcagtgatgatggaactgtgggcacagtagagccatgggtagcagcatcctcatttctttgcccatattccttcttggaaaagggtgggcttcctcaaagaccttggggaaagcaggggatgactgggaagacctcgtctaaatgggtcagacccagctggagcagaatgaatgcacataaacagtggttcgaggaggttctgccatttgccagctgtgcagcctggggggttgcttccaggagcttcagttgcctcatgtgtaagtggagacagacatcatgatgccttctttagagggtctttgtaggctaatgtacgcacatgcttacccagtccttggcacataggaagagtttcatagatgtcagttatcaacgtctgctagagactgaaattccccagggctgctgggttggctcaggagaggagccatagagttcaggaggagaaacctccttccaggcaaagccactctgtttgtccaacttgtcccgaagacatcaggtcctcggggttgggacaatgctgactctctctctgctactcctggctcctggcctgcgtgggggctgataaatattaactggtgctgatgggaacgctccctgtcaaggggacagcccattgtgtgcccacacacggcaaacactggttcctttctatccctgcgtgtggagcaggaggggctccctctctgggtctggcctaatccagccaagatacgcctccactgcctccacctccaagaaggcctctgagctgggtggttctaacagggctgctcctttgtcagctggaggtgcggagagtcttgtctgggctggcactgaggagagctctccatgcaaactccctgtgggcttctggccctaagctccttctgtccccagtgggttcaaagtttggcttgcaccagggatccagcccagcccttctaacggaggactgtagtttaggagcagccataactgccaggctgggacccttctagtaacaaacactgtccctctgacaaataaatgcctggcaagtaggagacaagatacatgaacccaggaagcaaaatgcacatggacccccccttacccttgtccccgacctgaccagttcccccacctcctgaccttcacctgaccctagtgaccccatagctcgctcacagccctggcccagagggaggcttgggggtccagtcctcgtcagcttctctgatggggccagctggcccgtcaaagctctgtccttcctcctaaggcctggaggcaccatggacaggtgggtgtatttgggagctgagccaggacatgttcgtcctgagtggggagaggtggaccggggacacagtaacccgctgggctgggccaccgtgaggggtcctggggcagctttctttagtctaggcattgttctcctggggacacttcaaatgaaggagattgtggcaacgaggcttggcagaaggggacattcccacaggcggagagtcctctgggacaggaacccagggtgcttggattctggggaagctggagttcggatttggatttttttttttttcttgtgatggagtcttgctctgtcacctaggctggagtacagtggtgcaatcttggctcactgcaacctccgcctcctggattcaagcgattctcctgcctcagcctcccatgtagctgggattacgggcgcgcgccaccgtgcccagctaatttttgtaattttagtagagacagggttttgctatggtggccaggctggtctcgaactcctgacctcaagtgatacacccgcctcagcctcccaaactgttgggattacaggtgtgagccactgtgcccagccggtttggatttttaatggggatagtccagttgccttggaaggccagtgattccaggaccccgttcaattccattagtagtcacaatgccttctttagagggtccctgtggctaacggaggcacagtgcataacacagtgcctggcatgtgtcttcacaggggttaataaatgtgaatgtgtctcaagggctgaaatatgggatggcttcgggtcccagaggtaaacaaaacctggcccttgagccttcctgctccctcttcctgtgtcagagcactcaggacggttcccaaatgaacacctcagtgtgtgtgtgtgtgtgtgtgtgtgtgtgtttgtgtgtgtgtgtgtgtgtgtgtgtgtgtgtgtgttcctggaagtaaggtgggagctccatgtcttagtagctcctggggtgagatcagaccctaacgtgtaaacacaggaagcggggaagtaccaggtgggcctggtttaatttacctctggggccccagaggagccagggacagcctgagaggctggtggggcctcagcgttccaggtgggggaaaaagctacagatcaaacagccgtctcctccaatcccccatccctcccaaagcctgcagcccacagaccctcctcctagctctcccaggctgtttgtctgcaggagttaagtcagctgaccatgtgtatgtcccatcattagcatttacctgctgccacccccctctgctcccggggtgctgtagagccaggtaagggctcccaccaggcctagctgtggggcctaggccaggagggctgggtgagggtgggaaaggaaagaggagcgaaggcagaagggccaccaggggagatctggccggacagcgtgactcctgggatggaaaggagaaatgtaggcaagaggagccctgagctcccgagaacagaggctatacagcctgggacccaggaaccagagcacccaggctctctcagccctgccatgtcctggtcgcatactggtgggcaagttgaaactctccctgggcctctgcttcctcatcagaagacaggagaacaggaaacctgccccacccaccccgagagctgtcgagaggattaaaggagataatgtaagggggagcgcagccacgcaactgggaggctgttgggaaagataaataaagtataaggtgacagatgtcagctgcccgagcccagaagtgctgcgggagcagctgtctttagcccacctgcctgcctgggggcagtgaggtgggaaactccctgcacaccgaccatctggacgcttcttggccctggttccccaaagagctgagctggtggagagtggctaggggagggggtcaggattctttacctctccccgcttagccacctgcctgtgtccccagcccctcccagccccaggcagccactaaagtactatccatctccatattgccccttctggacattgaatgtgaatggaatcatgcagtatgtggtcctaatttttttttttttttttttttgagacacagtctggctgtcacccaggctggagtgccgtggcgctatcttagctcactgcgacctctgcctcccaggttctagtgagtcttctgtctcagtctcccaagtagctgggattacaggtgtgtgccaccatgtctggctaattttgtatttttagtagagacgggtttcctcatgttggccaggctggtctcgaactcctgacttcaagtggtccacccgccttggcctcccaaagtggtgggattacaggtgtaatctttatcaacttcactccttatgatacaacttcattaagtgatacaacttcactccttatgttgtgcataatcctctaggttgcaaggatccttacactcagcatctggatggatacaatccactgtgcctggctggtcctaatatttttgaagttcaagttcattcacattatagctcctatcagaacttcactccttttttttttctttttttttcttttttttttttgagatgggggtctcactttgtcactgccaccttgaattcctgggctcaaaggatcctcccacctcagcctcctgagtagctgggactataggcacatgccacagtgcccagttgatttttttaatttttagtagaggtgtggtctggctatcttgcccaggctggtctcaaacccctgggctcaagcaatcctcctgccttggcctcccaaagtgctgggattgcaggtgtgagccactgtatccagtcacctgaacttcactccttttgctggctgaataatgtttgaggtgtggattcaccgtgttctgtttatcctttcatcagttgatgggtgtgtgggttgttctttttggctcttgtgcataatcctctaggttgcaaggatccttacactcagcatctggatggatacaaggaagggtgcttgttaacctgcagatttatgggcccatttccccacagattctgactgtgcgcgtgtgggaagtgcctgagaatctgcattttataagctccctgggtgactcaggtgaaggtatctgcagaccctttgagagacacagccctagtatattcttggttatacacactccccatcctaagcctccaggtctcagaatcgtatagccaggcaggaatctgaccaggacatcagccaggtgtggctgtgtcctaagcagccagctgggctttggtggctttatgagctcagcagggtcaactttggccttctccatccagcctgaaggctgacaggccccagggacacccttcctgggatcaacgttgcctttattgaggactcccaggatggtatgtttacaactagaaacatggccagcaacaaattctcctttaaagaaacaaacaaacaaacaaacagaaacagaaacagaaacagccttacaaggcctagaatcaggatttgttgtggtttagttttacctgtaagaatgaaggggctgtggcctggctccctgggctgcagataaagccagagccagattatctgctgaggcttcctgagtaggataggggtgttggtataatatgatttctcctctcaaggctacagccatgttggtcctcctgacttccaactgggaaaaacttgaggcccagagaagtgttggagcttcctaaaagtcacacagcaatgtcaaactgagcctcacttgtggcaccccctccctcggagatttttgccactagccttggaggctgtgggaggaatggtctaagtcagtggttctcaaccagggcaattttgcccccaggaacatttggcagtgtcacaaccgggggaagggtgcgactggcatctagtgggtagcggccagggatactgctcaacattctacaatgcacagaactgcccccacagcaaagaatgatccagcccaaaatgtcaacagtgccaagcctgagaaagcctggtccgtgctcaggcatttggaggccagaaagaatcctgttaaaagtgcaaagctgataaatgcagctgcagcctagtagtgtgacatgctttgtgcaaagtatttctcacctagatgcttgggatgagcctggtcccccgatagggacacagcttatggatgagacctcctctccctggcctgaggcccccacttccctacgggatcttgagtttccagcttaaaagactccgactccgtctggaactctggaaaggtcaaaatctgcattgaactaagagcagggctgggagaggaggccgtggaggtggggtctcaagccagagcctctgctgagttgggagcctggagctgcagcagcagatgggcttggagggacagagctctggcttgaagctgcccgcctcccatgtgagcaaagttgccattgaaacctcccagagacaggcacccagtatgagcatgagaatgcattccccgggggggctgtgagagagaatgcccatgctgagcccacctgcttaaggctgggggaggagctggctgaagccccacctggggtgtggcaacactcagctccctatggcaggtgagcctgccttggatgttgtattagtttgcaagctgctgtagcaaagtgccacacactgtgtggcttcaacaacagccacttactgtctcacagtaggtggaagtccacaatcaacatggcagcagggaagggtttgctccaggcctctctccttggctttatgcttatttatttatttatgaaacagaatctcactccctgacccaggctggattgcagtggcataatctccgctcactgcaacctctgcctcctgggttcaagagattctcatgcctcagcctcccaagtagctgggactacaggcgtgtaccaccacacccagctaattcttgtacttttagtagagatgggatttcaccatgttggctaggctgttcttgaactcctgacctcaggtgatcgacctcccaaagttctgggattacaggcgtgagccaccatgcctggctccccttggctttagatgagcatcttctccctgtgtctcttcctagcagcttccctctatgcagacctgtgcccaaatttccccttttcataacgacactcgtcatagtggataaagggctccccctactccaatgtgacctcatccttcctcaactgattacacctgcaacaaccccatttccaaataaggtcacattctaaggcactaggcattagggcttcacaacatgaaatctcggggggacacagttccacctctaacaagcgggtactccccccagccaggcagctgtttgtccactcgtgcccttggagaagcatggtgggcaggctgggttctgagacccacaactctgaatctgcccagctctgcactttgcagtgaggctgtgggtaatttacttaacccaactgattcctcatctccaggcaagtgataataagagtgccctctctttttttatttgtttgtttttgtttttttgagacagagtctcgctctgtcacccaggctggagtgtggtggcacaatcttggctcactgcaacctctgcctctcaggtttaagtgattctcctgcctcagccccccaagtagctgggactacaggcgcgtgccaccatgcccggctagtttttgtatttttagtattttagtagagacggggtttcgccatgttggccaggctggtctcgaactcctgacctcaagtgatctgcccacctcagcctcccaaagtgctgggattacaggcatgagccaccgtgcccggcaagagtgcccactcttaagctgtcagggaaaacacacgccaagcccttggcaccatgcctggcacaatcaccactccctataaacgaaagctttattcagcaaacgtctcttggacatctgctgtgtgccaaccaggggggcctttagagggaggctcagaggatgtacagaagcctcccctagtagggactgcatgtgctcacggggtggggggggtgcctgggtgggtggggcatgcgtgtgctggcctctgtagatgcacacgtcagttctcggatctgtgcagtgaagagccttggcacattgagtggaaggtgaagctccagctctctcttcccgacccagtgtttctcacaagaaaccccagtgatctgagctgagaaccagtgccacagcctgcccatcgcctctttgccttgctcatgtaatagtccgaaattctctctccactccacctctctcattctttaggactcaatgctagtgccacctcttccaggaagtcttcctctaggagtaggattaggtgcctccctgtgctctggcactttccaggttattgacatgatccttgagggtcggaaggcaggaaacctggcctccttttgcactctgtccctgagaccttgctcagcaagcgtgttgacctggcctgagcaccccatgctggtctccctggcagctcagagcacctgtccccacccctctccagctcagctctggctcacctggaggaggggcacaagggctccattgtgtgctagaggggacaggaatagggtgatgctctcgagggtggggcgggggctggagcccggacagatggaacccagacaaagccctctttaagcggggatcgtggcagctgtgctgacagtgtactacaggagcctggttagctaaaggaaccaaatgcccaggacgctgtgaacttggcagtgtctggaggttgtatgaaggtcatgggtgggatgggcattggtgcatgccactcaccctccctagcactgaaggcccccctcccagagggtgctcctcaggccactggtcctccccgtgtccacaggaacaccggcattgggatgagagcgggagcagctggctgggttctggttgcatcccatggggacccataccggggaactcagagccaggttttaccttcagtggggtctgacaccagagcagggctcatgctgcaagctttggggcctgggacaggggccagatcctagaagaggctcactgtgaccacctagcttctggccagctggcagggagcctgagtgagtggcctcattcttttccccgcacaaagcccccggtccatcctatctagagccctctcctgtaactggctgacctgaaatcccatctgattgggaaagacttccacatgaggctgccagggtcaggcctcctcttcccgcttccctcctccactgagaatcccagaaggggccttgccagatacctgatggtcataggttagttttgatgcattgagcacaggtatgaacctatcccaggagtccaggtggtgaaggaagggggtttgacccagggcacacgtagaatgctgagggagtctggtgggagccccagggctgtcatcctcctgggactgggcattctaaatccgcaagctcgatctgggtggacccagagggacccacgaggatctcctggatccatggagcccggctgtgctcacagctctgctgcctgctgccccctcaccagcctctcctcaccccagagcggccacccctcatgccttgtctgttcccaagccctttttgggactgtcaccagccctggctcccctgctgacccaggaagggagcatagcccctgtctctgcttctatggggcacccctatgacagcccaccctcctcagtaccctgcccgctgttaggactcagtttacctccttggacagtatcttatccccggttgagttaggtagggctaatgcacaccctgggtgttggggcttcctggaattacaggaactactgagggacagggcaggaactcccctacctgccccaccccacaaggcccctcgtgggagtaggggtggaagtgtgtgcgtgagaggcagtttagaagggtagccggagcaccagctgggacccagactgccaggccccagtcctggctctgccatttcctagcaacatgactttgtgcctcaacttccccatctgagaagaatcatcgtgatgattcaaattgaagtgctcagtcacaatgatccattgtgattatgtgctgggaggagggggctgcccatgccctacctccctcgccaccttccctcccactgaaagaggggaccgatgagacacccattccctacctccctcgcccccttccctcccactgaaagaggggaccaatgagacacccattccctacctccctcgcccccttccctcccactgaaagaggggacgcatgagatgcccatgctggctgaggctgccgtcatgcactccgttcagcacccacggccccagggagcatgctcccttctcatgaagagcacggtggtggctcattttcccctggctatcacaagccaggaccccagggagcccaggcgtccccaggcgcagagcagcatttagaggcgccagctgcctctcagggggcacctccgcggtgcagtggttgggggtggtgcatgaggacagggactatggtccaaagggacctcaggcaggtgcagggcctgtggaatcccagtgaccttctccacggtgagggtggagttgtgggtctcgacttgatggcagagtcatgggtgcggggaacaggtggccactctcagtctccacccctgccctcttaacagcccgttgaacaaagactgttgagctcttggcacatgcccagcgctgtgcccaagcacattacacgttgttccagggtcttcccagcgctgcaggtggatcatgctgctgtcccatctgacagaggaggagatggaggctcaagcaggttataccaggcccgaccaccaataagaggtcacagggccctcagtgcctaccctgattctcctttgctgcccctgctcctctcatcctaaatcctccaaactcaagccctcccacgcatctttgaatgtctcccgtcatttccatgaatctggcattgtctctatcccctcccataccctagactagggcccccagcaaggacgcagcctccttcctctgcatctctgcatagagctcgggacaaggctgagtacacaccaagtgcacaggggcagaggcaggggcagagtggagcaggccctgagatagttctagaaaatgggcccctcggttacctttggaggaagggaagaacccggccaggacccttctgtgtctcaacacacgtgccagcaggtatgcgcgcgcgtacacacacacacacacactgctgccactcctaccctgcagggaggggagccccagctgggattggcccacccatggcctgtcctggctgccagcccaagcccctctgcctccctttccaccctttccactcccggctcaggctcaaagctgcaaagggccactggagcagttccctcacagccctctcagctgcgagtggagatccccaagcccagcgtgctgacctcatccctcacccagctgcctgtggctctttgctctgtcccaggctctgccctggaggggtgaggcggagcaggcagggctgtagcgaggtggataggagtcagtggactttgaactcagagcctggttggcaccctgggtctccccttgctgatgtgtgacgacctggggggtgtgactcctttggaccctgatttcctcatctgtaaggtgggagtcatagctggccttagcctggggtcatggctggggttaaaagagactgtgtgaggccgggtgtggtggctcatgcctataatcccagcattttgggaggccgaggctggcgggtcacttgaggtcaggagtttgagaccagcctggccaacatggagaaaccccatctctactaaaaatacaggtggcacacgcctgtagtcccaggtacgctggaggctgtggcaggagaatcactgaacccaggaggtggaggttgcagtgagccgagatcacaccactgcactccagcctgggcaacgagcaagactccgtctcaaaaataaataaataaataaaagagactgtatgtgtgggtgcttgcaacaggtcctgacacaaaatgagccctgacagatgctgcccgttcttctgttgcacctctctggcagaggcagcatggggggtgttgaagtgaggggcaggcccccagggtctgggctcgtggtagcctgggcatcacctgtgtgtgctctgctcccctggggctgtactggccttgcagaggcaattgctcgttgtcaggaaggtgtcccctttgggcatccaagggcagatgatggcgagcctgacccgacatgggaaagctgaagaggacaggaatgggctctggctccgagacctacctccagtgggacctgggccctggactccggcctctggcccctcccatctcttgcccacatcctgaggcgacgagggctagattcagagcccagaagggctttgttaactctgatcgacaaaggggttaactttgttaaccttcctgagggttgacctcatcagggcccggggttcccaggtgaccgtgggcctccctctggggaccttgcagatggtggttctcatggacccaatggaggatcccgacgacatcctgcgggcgcatcgctcccgggagaagtcctacctgttcgacgtggcctttgacttcaccgccacccaggtgagggagggcctgggctggagacacgcaggagcccctcccccacccttagccccactcaggaggggccctccagggcccctgcctttgaacctcagcctccactccacctgctcaccctctgttccttgagccttccccattcaggaaggttctcatgcacacaaggcacacacacccggcctcctgcaaggatgcactggggttggcactcagacaccaccctacacggtacaactcgcttggctcctactgagctggaaaaggagcttgaaggccatctggtgtggggaggacaggggcagagggtgggttcagcgaagctgacaccctcctcgaggacccccatctcgcccatctgtgggatgctcccaggaacagatgtgatgcatcctcagggcggggggccaggagccagctgcgcaggaaggcgtctcaggtgtcctgggctctctttcagcctgacgtcccccactgtgagtgtaagcagagacatcccctcccccaccccccacccccacttatcttggggctggggctccagggacagaaacctctcctatcagaggtcaggaagagccagtgggtgcctgtgctgtgccccgcctgtgtcccggcccctgacaggcttccttcctcgcaggagatggtgtatcaggccaccaccaagagcctcatcgagggcgtcatctcaggctacaatgccactgtctttgcctatggccccacaggtaaggggaatgcccagactgtgggcgaggaccgcaatgcccctgtaatccccgtcaccctccaactagtctgaccccagctggagcaggaatccaggatgtggtcgctccacatctcacccagggccctccagccccagaggccccaacccgagccggggcatcatcctccccactccccaccacctccctggccctctgagagggcccagccttgaggacaaaccccggtttccaggagtgcctgcccagcaaggcctccctcccagccccaccccggtcaccctccaccttgttctgccccaggctgtgggaaaacctacaccatgctgggcacagaccaggagcctggcatctatgttcagaccctcaacgacctcttccgtgccatcgaggagaccagcaatgacatggagtatgaggtctccatgtcctacctggaggtgagtcccccagcctaggctcagatggggctggcctccctccctggggctggtcactgtgcagcttcccggggcgctcatcactgctgccctcctgcatgcctactgtgagctccactttacaaacatcgcaggctcatcagagaggttaggcaactaggccaatgtcacacagtaagcgagggagcggggattcaaactcaggaccctgcagcttcaaggccaagctccgccctgtgccacgctcaccacctcaccatcctcacaggcccattccttagagcagaccctgtctgccctgccaggctgcctccagcgattctgtgtatgtgggtacagtgaaaactgaacatacatgtacagtctggaacctgtgggcctttgccacccagccacagcctcctggtgcccaccccatgggagtgctatcaccagacagtgatgggatgtcagggactggggaagcacacagagtccagaagaggtgggaggctggacttcatctggctcctccgggagctgataatctcctgggtgacatcttaaggaggcagtgaggcacagcaccagcagctgctggccaacaaggtgttgattcagccagcaagactcgctttacggggtgggggtgcccccagaaggagcacaggggttgcctagcaatgaacagggctcctcactgggtgggggaagggggttctggtcatttgtcaggtccccatgcaactaggtcaatgtcacacagtaagtgagggaatggggattcacactcaggaccctgcccggtgcccagcctgtctggaaaggggtgctccttggtttcaaagcctcctgtaaccttggctccagcagcccgatgtttcctgtggatgctgaagcccctgaccccataggaaggaaagggcctttcctcctaatcagggctcttctgagaagagcctgggctcaggaagggtgaactcttgtccctttcctgcacgaaaggaaaggggactcagccctggccttgacctcctgcccttagtctcccttcccccacccctcccccacctgtcccgtcagatctacaatgagatgatccgggacctgctgaacccctccctgggctacctggagctgcgggaggactctaagggggtgatccaggtggccggcatcaccgaagtctccaccatcaatgccaaggaggcgagttttgtgtggccagcctggagccgctgagaggaagctcaccgcctgaggggcaggaggggcggggacagaagccagggagctgctccccactcggctgaggctgggacagacaggagaatcctgagtggcagcaaggaggggactcacacctgccccaatgcccccaccacgctgaccctgggagagtaaccaggcaacactgcctctccatttacacagagaccctgacctccagagagccgaggcccacgccaggcctctcagcacacggagcccagcccactccagcctgccctttcccaactgctcagacataggaccctccctgctagccccctcaggggctcctctctgccggagcacctacggcagtcgctaagagctgcctctcctccctcccacccagatcatgcagctgctgatgaaggggaaccggcagaggacccaggagcccacggccgccaaccagacgtcctcccgctcccacgcggtactgcaggtgaccgtgcgccagcgcagccgggtcaagaacatcttgcaggaggtgcggcagggccgcctgttcatgatcgacctggctggctcagagcgcgcctcgcaggtgaggctgggacctgggctgggcagaggagggagggttgacccaggcaacagcggagggcaggaatggtgactcccatgcaaggccagcaccacaggaacaggggagacaggttgggaggtggggacagggacgctggcatctcagcttcgtaggagttggagcggggaggatgtcgcagcgaggtggaggggatgagtggagacccccgggttaaggaagtgaggaacgttccagaggagcagggttggggggaatggggtagggcatcccgggaagagccaaggagctctggtgggaaggggaaggaggatgggggtttctccagggaaggagactgtggctgccctaggggagggatccaggaagacaatgaatgggcccaaaggagtagttggaggcagggagagacaagcatcccctgactgggaggacttgacacatcctgggagaggacccagccagtcacatcacaaagaggagaaggtccccgtcacccatttctggcagcatctttgtcccctctcatgaagcttggctttgtggcagcacctttgtcccctcccatgaagtcctgcttgccgagctctgcagccttggtggcagcaccacccagctggtgtaggtctgggctccctcgtgcaggcaatcttgggggttttatggtcacctgagcaatgaggctgggtgatgtcaccattgctggcactggaacaaatgcaagggaaatgacagtgccagaaagaatgagcagtcttttgtctttgaacatctggggtcggatccgaacagggcaggttcaagaaacttacccctcccttccagtaaagcctggggggcttcctggaaggcacacaggggagaggcctgggaggagagagagtgcccttcagccactggagcgagctggtcccggcttctccaggctgggcagagccacctcctaaggggagctgcaggcagggcctcctcggctttgacatgctcctgcaggcccaagaaaaggagaagaacctgccctccaccaccatgcacatgtgcacgcactttcctccttgctccctggagcaccctctggagcaccagtggtcctgccggctcccagctgagctgcctggaaagcaacctccctcccatctcatccatggcactgtgtgtcaggccgtgccacggcacctgccctgaggagaaccggccatctcagccctcctcagaagctgtcagcccatcactcttgttcagaggcctctgggtctcttaaccttctccaatgccctcagtggccttggcaggaggacggccacaaggtccttgggggtttattacccaggatcaccaggtcattcattggtggggtggctggggagaaacccagtcccctgcctcatcaggccacacgtgtgccctttgctcgccccctagacacagaatcgtgggcagcgtatgaaggagggggcccacatcaaccgctcactgctggcactgggcaactgcatcaacgccctgagcgacaagggtagcaacaagtacatcaactatcgcgacagcaagctcacccggctcctgaaggtaccagccacagctgggcctgggcactgggcaccaagggtgaggctgccagattaaacaaatgaaaatacagggcacccagctaaattccaacctcaggatacacagcaaaatttattttagcgtaaatatgtcccatgaaatatttgggatattcttatgctaaaacaaagtaattgcatatctgaaattcaaatttaactgggtatcctgtattttatctgacgaccctaaccaaaggctgggcaatgggaaggaaaaggagcacgtgatacccccacccagggctgtgggtcagagccgtctagatttgggggtgcaggtgggcagtcagcctcatggccccacaggtcagctgtttgggggtggcctcctttgtgcaggggtgtccttggccttaaattatagcagcatcactgagcgcccactcctggctggtctcttgaattcagtacttcactctattagctccttagatctcgtcaacaactctatgagtttgagggattacatttgcagatgaggaaactgaggcacaactcagttaggtaatgttcctaagggctcacactagtaagtgctgaaagtaggatccagtcagaggcctccctgatctaatatcagagtcaccgcttacttaacattgccagcagctgccgtcatgactgcacctagaagccggggaggtggggacaattgcaaaaggactgcccccttaaaaagcaaggaaagccgggtgtggtggctcacgcctggaatcccagcactttgggaggccgaggcaggtggatcacttaaggtcaggagttcaagacaagcctggccaccatggtgaaaccccatctctactaaaaatacaaaaattgcccaggcatggtggcagacgcctatagtcccagctactcgagaggctgaggcacgagaattgcttggacctgggaggtggaggttgcagtgagctgagacagcgccactgcactccagcctggatgacagatcgagaccctgtctcaaaaaaaaaaaaaaaagaactaaagaggtgaatgagctttattaaggttacacagctggtaattgctggagcagggctttcttcctcccaagcctcacaccatatgacgctcagcagccgggtcccttaagtgtaaagagacagagagattgcactcgccagggagggcatcgtgaacagcctggcaggaggaaggcctgaggaggcagtccccactgaccacagccacctcccatccaggactctctgggaggaaacagccgcacagtgatgatcgctcacatcagtcctgcgagcagtgccttcgaggagtcccggaacaccctgacctacgccggccgggccaagaacattaagactagggtgagggcccctggaccgtccaccaggacacaccttcctgggctgagattcaagcccccgggctgatccctgccaccccactgcactctctggaaccagccactgctgcactggcctcattccctagttgatcgtcacctgtacactttccctgcacctccaaaccctgctcctctgccgggaagccgacagctcccaagggtccccgcttcctccagtcccaggactgtgctccccctgcctcatcccctcttctcttcccttcctcgtcttcagatgctcatttagacctttgcatttccaaagcacctcttcatgatggtcatcacaggaggcaagcttcattgagcacttgctctgagctgtttcacatgctacctcctttgatcctcaaaaaacagcagtattattgcggttcccatgtacagattaggacagcaaggcttaaggaagttaagtgacttcccagctggccagtgatggcgctgaggatggaaatgagatctgccccgtttccaagtccgtgtcctcacctgtctgtaagcatgtcggaacccttgccatccgcttagaaatccatttccacctgttcgtgtgtggaggagtgggaatggattcatgtatgatagcatgtagggaacattctcccaacacctaacacttgccagctgctgccctgagggctgtaagttttattccaacccctcaatgggggacgggagacacattcttgaaacagctcattgatggttcagaatattcctaatagcaggtaaatgatgccaatggtaggtgctggggcaagacaggaacaggaggtgggggtggcctggtggggtccagtggaactctctggagactgtgagtgggaccctgaaggctgggaggacattccagaaaggtgggagcagggagagcacaggttccaaaggcaggaaggggatggcgtctgtggtgggtatggggagagcaggacaggtcttcaactggagtgggatgttcatgcaggagcggtgagcccagagaaaatcagagagatgggggtggcccttcaacaacgggtggaggaatgaggacgttccccgcaggcattaggaagccactgaaggttgatgagatctagcagtgagtgtgacaggaggttgtggaagtggaggaaaggaggccattactgtcacccagaaagactgggggaggcagggggaagaaaggccctgcaggcaggcctcggtgagtgcacctggggtgactgcatcccctccgctccatacgtgttccctgcaggtgaagcagaacctcctgaacgtctcctaccacatcgcccagtacaccagcatcatcgctgacctgcggggcgagatccagcgactcaagcgcaagattgatgagcagactgggcggggccaggcccggggccggcaggatcggggtgacatccgccacatccaaggtgcgcctgtgggtctgtgtgagtggcagccccctccggccagcctcacgttgctctgggatcaggccatgttgtgttcaaatccagaatcgggctctttctggctgggtggttgagctaggcactcaccagctctgagcctcctagcattcagctgttaaatggggttgtgatctctgcttcagacagttaccagagatcacaagccgatttcccaaccccaccttggaagagtaggtgggatcccacgagggagaggcacgtgagcaatgagctgcgcagggcgcacactaagggctgtggcgtagggctgcgaggtcatgcctgcacccccggaatgggctccgtttccttgtagacctgcatatttgctatgatggttttccaacagacagtaaagctttttttaaaaaaaaatttactaatataaagagagaggcagacagtaaagatttttttttttttttgagacagagtcttgctctgttgcccaggctggagtgcagtggcatgatctaggcttactgcaacctctgcctcccgggttcaagcgattcttctgcctcagcctcccaagtagctgggattacaggtgcccgccaccacacctggctaatttttgtatttttagtagagacgaggtttcaccatgttggccaggctggtctcgaactcccgacctcaggtgatctgcctgcctaggcctcccaaagtgctgggattacaggtgtaagctactgtgcctggccacagacggtagtttctaggggcacctttttatagttggcacagaggtgctgtaagggttagcaggagcccagttcataccaaggagctgggaattgcttttgggcaacagcttgaagactcaatgtgggagtggggtctgggaggatgtagtaatctagggggtcttcctggaggaagcagttggacaggaagtgggagcactgagttgggaagaaaaggaggggaggggcccaggtgggcccaggctttgctagctgaacttgccgcctcctctaccttgcccaccctcacccatcggcagctgaggtccagctgcacagcgggcagggtgagaaggctggcatgggacagcttcgggagcagctcgccagcgccttccaggagcagatggatgtgcggaggcgcctgctggagctggagaaccgcgccatggaggtccagattgacacctcccgacacctgctcaccatcgccgggtaagcccccctcccaggaccctccaggccccacccctgtgcctgggacagaggagcacgacctgtggctgtacagtgtgccctgcccccatggcctgaatgccctgtctctctgggtggggctgcggcagctggaagcatgagaagtcccgccgggccctcaaatggcgggaggagcagcgaaaggagtgctacgctaaggacgacagcgagaaggactcagacacaggtgatgaccaaccagacatcctggagccacccgaggtggccgcagcccgggagagcattgcagccctggtggacgagcagaagcaactgcgcaagcagaaggtgtccagggtttggggggacaaggagagtgggtttaggggacagggtgagcaggtttgagaggcaaggcggaggggccagggtgggggtagccgtgagacttgggaactcaggccacaaatcctgtgtgactttgctaagctctttaacttctctatgcgtcacattccccacctgtaaaatgggagcagtccatggtgcagccctcatggggttgctgggaagattacataaatgcctggcacataccaaggactcaaaaaatggtaactaatgttataattagggtttttcaggctgggcacagtgactcacacctgtaatctcagcacgttgggaagttgaggtaggcagatcacttgaggccaggagttcgagaccagcctggccaacatggcgaaatcccgtctttactaaaaatacaaaaaaaaaaaaaaaaaagcctagtgtggtggctcacgcctgtaatcccagctactcggatggcagaggaataagaatcacttgcaaccctgcagaggttgcagggagccgggatagcgccaccgcactccagcctgggtgacagagagagatcctgtctcaaaaaagaaaaataataataataattagggttttcccaataacagatctttgccttctgttctgggacatacccagaccaaaggggctttagggtatcatgagccctgagggggtcacatgggctggggttgagcagttatcccccaagctggttccaggggtggtttgcggtcaggatagcaagaaagtggacactgaggggccaccttggagcagtccctgattgtaaggcccaagattcagcttttagggttggcctcaggctggagctccagacagatgcctggagtccaggcgctggagggtcgaggacgagctgggcaggcggatcggacccctctccccgctgccagatgctgacctgcgcctcctgcagctggcgctggagcagcgctgccgggagctgcgcgcgcggggccggcgcctggaggagacgctgccgcggcgcatcggctccgaggagcagcgcgaggtgctcagcctgctgtgccgcgtgcacgagctcgaggtggagaacaccgagatgcagtcgcacgcgctgctccgcgacggtgcgctccgccaccgccacgaggccgtgcgccgcctggagcagcaccgcagtctctgcgacgagattatccagggccagcggcagatcatcgacggtagggcccacgcccccgcgcatctgagccacccgcgggggggccgctggcactcactgagccctgccccttccccagcagactacaacctggccgtcccgcagcgcctggaagagctctacgaagtgtacctgcgggagctggaggagggcagcctggagcaggccaccatcatggaccaagtggcctccagggccctgcaggtgggtgggcgcctgggcggcctgaacatgggcacatgtgcccagggaggggctgatgaccaaggcaatgccttcaggcagctggaggggacaggaccaggctggctggcaccccagggagttgactccctttccttcttaccccacccaaagccttgtcaagcctgagtaagaccctcctccttgggcactcctgggcatcacttgctcccacccagggtctgagggtcagggctggccatctgagatatcacaaatggctccagctgccctcccaggagaccaagcatcaggcagtgccactggggaagcctagcagaccacagcttaaccccgaggacccaaacacaagcccactgcccttctggggctcccaggccatcttacagcccttgtcaccctgtaagcctttgtgactctgtgctgatttggtccaggaccaaatcttctaactgtccaccctggctccctcctccccaggacagctccttgcccaaaattaccccagcaggaacctcactgaccccagattctgacctggagagtgtgaagacattgagctctgatgcccagcacctgcagaacagcgccctccctcccctcagcacagagaggtgagatgggggccacctgccccagcccccaccctgtgccctgtcccagagaggccaacccagactaaggctaaatggggaacacagagcagcaatgagagggagcaggtggcccaggtctggagccaggactcctgggttctctctcctttcacaccaacagcttctcccctggggtgggggtgggacctcggtgagatagcctggtctacagccactcatcttcctctgccaacttcagtgaaggccaccacgtgttcaaggctggtactggggcctggcaggcaaaaagctcctctgtgcccaccccacctcccatccagctcggcagcctggtgacgcaggaggtgagctctcagtacccgatggccccacgagctccactgcagcgggtgcgggacatgggggtggacagcagcagttgggatggaccctttcccaaacggcaccagcttgaggccccgctgtctctgctgagtggggcatggggtccctgctgtgtttaagggtttcctcctcccaaccactccaccccacaggccccggctcaggacagcctgggcagctggatcaactcttcccctgacagcagtgagaacctgtcggagatccccttgtcccacaaaggtatgtgtgccctctgctgcccggccacctcacctggccttgtctaaactgttcagatcacccagctcaaagccctttcctgccctctgcactgccaagtgcaaccaagcattgggtgctacacattctgtagaggcaccattgcccctgaggattagtcagtcaaggacacttaagagtcttctctaagtcaaggacatttagagagatgggggcagaatcggaaattagaaaagagacatgtggcatggagacttatgtcccccctcccccgccgcctccgctcagtaatcactgtaatagcaaatatcgattcaatgtctgccccctggataatgtaggttgagcccatttcctcaattaatcctggaaataaccgatggcattagttttaccatcccccatttgcagatgaaagtgaggctcggaaatgggcccaagtttcttacatagcaaacccctggaagtgctaggattgaaacccaggaggtctggctcctacccacgtctgccatgtcagaggagggtgttgagaggtggccttgatctcgggttgtatgttccccgtgtcccgctgcagagaggaaggagatcctgactggcaccaagtgcatctgggtgaaggccgcccggcggcgctcgcgggccctgggaaccgaggggcgacacctgctggcacccgcgacagagcgcagcagcctgtccctgcactcactgagcgagggcgacgatgcgcggccaccaggcccactggcctgcaagcggccgcccagccccacactacagcatgctgccagtgaggacaacctgtccagcagcacgggcgaggccccgtcccgggcagtcggacatcatggggacggccccaggccctggctgcgtggccagaagaaaagcctgggcaagaaaagggaggagtcgctggaggcaaagagaaggaagcggaggtcccgatccttcgaggtcaccgggcaaggggtgaggcgaggcgcaggggtgggtgtctaggcactcccatagcagctggaggcctgagggctggatttctccaaaggctccagggcacctctagcctaccccatacctggaggcaccaccctccacagtctctgtccccagcctagcatagtagctgggacagatcctggtagcagatccctgtgccgctctcggcctcaccccactgttcaaccatcacagctctcccaccccaagacacacctcctggggccccatcaggcggagcgcatctcggaccacaggatgccagtgtgcaggcacccagcccctggtatccggcatctgggaaaggtcacgctacctttggccaaagtcaaactccctccaagccagaacacgggtcagtatgggcaaggaggggatggggaggggaggcctccaccaggcaggggagcagagaagacacattgcatttcctgcgcctctggctgccccttgctggaagcatggttctagcagaatactcatgggactggcatcctggggtggtgcccctagagagttcaaggccactgggtgatgggagaggagttggggaggcattccgaaaccactgatcctgcccctttccctgttgcaggcccgggggactcctcacccctggctgttccccccaacccaggtggtggttctcgacgggctacccgtgggccccgcctgccccacggcacaagcacccatggcaaagatggatgctcccggcataactgaggggccctgcctggaactggctctctcacctcccaagactgaatggggtctagcagggcatgggaggtggaggctgggcagatggagatgaccaggaagtaagctcaggatctcagcaggccagggctcctgagacccaggaactggggtctctgcccaaccctcccatgctttcagtgccactggggaaaagaggtgaggccaggggacatggccaggacggctgggctccctggcttcccagccctggacagaatgctgttgccaaaacctgcacagccctgaggccagcctcggccttggtaacggaggaaagcagctgacagtgagacggggctcctggcccacgtgtggggcacgggcatcctggatggttggggaggcgccgacaggcacttcacgtattacaattggggatgtgggtgagggagggaatctggttttgttacttggcagtggttttttctcacccttcctttttaacaataaaatcccatttgggtcttgatggttgtgttggaaatttgaccttgtctggaatgtggggtggccatgactaagattcaaccaactcccgctccccctagtccccatctacccctggctcgctatatagcaccaacctacaaatacctgggggagaggggtttttctctagatcctgaggcctctccccatggtggggctagcaagatccgttatgtccctatcccactggccttcacacctgcccaggcaccctcccaggagaggtcagggacctgaggcggcccagatgccagaaagtctcacaacccagatgaggcggttgcccctcgaggtcagggctcagaaactgcccagctaagcccctcagcctcaaagtgaggaaactcctgcaaggggaatggggtgctccctgactcccccgcaaggggaatggggcgctccctgtctcccaggcaggtgggttgctgtgaccatgtggatgcttttacctgccctagttctgtgtctgggtggggggaaagctcaacaaaggggagtgaaacccctaaaccccctggcttgtgggaccctccctgggttgtttttacccagaaactgagtggttcaatcatccctttaccactctgagcatcggtttattcaggaccaagaacgttccttcaagtcagctgtgaaatcagctcttgaaaccaggcatcttgtctaccacgcctcacctggactccaccccagccctagggtggccggcgcctggccatccaggggaccaggcttgttgccacctccaggctcgccttgcccttcccagacccacagggaccacctaggccaggcctttattcccagaccccgaggctacttgggggtccggataagggtgtggtatacgggcttgacgatgaggtgcaggtgcagggcgttctcaaccaggtactcggagttgcgccgctgcaggtcggcgtgcgccaggaagtcgccggcctcctcgctgctctggtggaagctgtaggcgtggcggaccagcaggcggccctgctggcgcgcccccaccagcaccgtcttctggaagctcacgcccgccgcgtcgccgccgctgctggccggcgtcaccaccagccgcggtcggccgtcctccgggcgcgcggcgggcagagcagtgcccgcggcgtccgcgtaaacgggccgcaggctgacgggcagccagcgcggcgagaagagcacgttccaggtgacccggcggcccgcgtcgtggccactcgggcccagctgcgtctggaagctggtgctgcggtcgtcgcgggccgggttgttgatgacccacggggcgccccaggcgggcgcgaggtagttgcggggcaggaaggcgctgccgttgacgtcgaagaacttggcgtagtgcagcggcgacgcggcgtggaactggtaggcctgcagcaggaggtcggccaccgcggggccgtggcgcgccagggctgccgagcgcgcctgcagctggaacagctgtgccggtgggatcatggggtagcgtatggcgcgcagcgcccgctcggccacggcagggggcggccgcgcgcgacccagccaggcctccagcgcgtggaacagctccagttcatcctgcagcaccaggtccgagcgttgcaggagctgccagagcagctcggggctcacggcgccccactcggtgctggccgccacggccgacaggttccaggccaggaactgcaggcagctctcgcgcagggcctcgtccccggtgcccaccgcgtagtggtaccagcccaccgccgggcccgcgcctcccgccaggtgcgcgcgcatgtagtcggccacgccgcgctgcagggaggacacgccgtacttggtggccagtctgtgcagggggatggcctgggtcagcagcacggtcagctccccgcagtacaggtacctgcgggagagaccgagaggtggggcggggtcagggcggtacccacctcccaggatagattttttagagtccacaggggacccggcctggagttggagcttcactgtccgggtgcaaacacagtggaagccccaccctgaggcttcccatgttttcctttcaaggacccttccaggccattcttacttcacaggctcttctttccgtttccgcggtgatgtagaaattgcctgcattgactgtgcctctactaggcgtgcagccctaggctggaacaaaacagacgtggctcctgcctttggggtttccagtctggttgggatccatggcctgccttctccttgccatgagtctgggcaagtcacttaacttcagtgaaccttaggctaatcaatcacctaggaaagggggagtggcacacacccctcagggttactgtgacaaccagaggagaataaagaatcttgctacaggccaggtgggtgctagtggctcacacctggaatctcagcactttggaaggccaagatgggaggattgcttgaggccaggagttcaagaccagcttgggcaacatagcaagaccctatctctacaaaaaataaaaaatgttaaaacattagtcatgtgtggtggtgcacgcttgtagtcccagctgcctgggagtctgaggtgggaagatagcttcagcctaggagttcaaggctgcagtgagctatgatcatcatgccacgacactccagctttttttttttttttttttttttttgagatggggtctttctgtattgctcaggttggtctcaaactcctggacttgagcagtcctcccaccttggcctctcaaagtgctgggattacaggtgtgagcccccatttcttttttgcagcctcacctttctttttcctctcctactgttggtgatcacttctgctgagtatctcttcgtcttacttctgccactgtcccatggctcacctttcctgccagtccccaccggcacacggcaccgcacttgcctctataggagtgtggcagccactgccagccatcttccccaacgtccatttctcccctttcccctgcgtgattgcctctgggaataaaagaccacatttcccaggctccctcattctggccttggccatgtgactaactgctggtcaatgggcgcagtttgggatttgcaggaaggctgattaaatgcaactgattccgggttaacaggaagaccctttttgcccttctgtcttatcccctttcctgttgcctggaacttggaagcaatgtatggaattctgcaggcatctcgtctgagccgttagaacagagttactttcttagacactagtgtgaatggcaccccctgagcagcatcacggcaggaggcaggaggtggagagagccgtctaactttttcagctccctagccctgtggttccaaacctggccaaacaccaaaaccacagcgatgctttcaaataaaaaatattcgtctataatggaatatttaggaaaataaaaagtaaataaataaaataaaataaaaaatgattgctggccctaaccctagacctgaaactgacaatccaggttgggatccgtgaaactgtagtttttttgtttgtttgtttggttggttggttggttggttggttgatttttttcagacagaatcctgctctgtcacccaggctggaatctagtggcacaatctcagctcactgcaaacccaaactctgcctcccaggttcaagccattctcctgccttagcctcccaaatagctgggattacagtcgtgtgccaccacacccagctaattttctatatttttagtagagacagggtttcaccatgttggccaggctggtcttgaactcctgacctcaagtgatccacctgcctcagcctcccaaattgctgggattacaggcatgagccaccgtgcccggccccaaaactgtagtttttaaaagctgtctatggccaggtttggaaacagctctgagggggttactaggaaccgaaagtgacatcaaactgcacagatgacacgggcaaagacagggagctgtacagtggaagaagggatgcaggggtcactgtcatcccagtgatgtccggggaaatggacataacaacctctaagggcctgggcttccctgaccctgtaggtggaggagccgggggctgaggaagggatgaagccatcccctagtcttccgcgtccccacctgatgaacttgtcgaagacagcggcgcagtcctgtggctcctgcagcaccgcctcgctctggttacttagcagctccaggaacagctcactgtgcagtcccagcagcaggcggtgggcgtggaatacccggacctcatcggtgcccgcagcctgcacccgcagaaccacatcgctggcgttgccctgccgcagcagctcctgcaagcgctggagcaccgcctgggagtggttgatggaggtgccagctgcctccccgccaacatcggctctctgtgctgcagcaggaaggaacacagcatagcctgagaaggtgcccgggcccagaacctcagtcaggggtggagagggaccagctggagacatatgcatgggtgtgagcagagggcaaggtgggcctaggcgggttgtatgtgcatacctgtttgtgcccacgaggcgcgtggatgcatcggtgcacatacaaacgcaccctgggtgggaaggtcatgccaatgcaaaccccaagaggatgctcttggaagggggtgcattcaggcagggggaggttgtgctcaggtttaggacaacatgcccagaactcatctccatgctgccagccccccaggcaagggttgaggaaactcgtggtcccacccttctcacttcctaaagaattatccatctaaccccttggagcagtagtcagaagtggtgcattcactaacaaatatttattgagcacttactatatgctagacattctcctaagagcttgggatgtggcagtggacaaagcaagccaagttcttatgctcataaaagcacgaattgacatatcaaacgggtaagacacacacaaataagcactccagttttaaaggagccagccagggaaccagtgtcaaggcaggctccagccccgcaaaggcccttgaacggaatgggcctggggtactgggagcagagagagcattagggaggccacagcagtagcaggagagaggggcgggtgtgagacgaggctgcgggtgtggaagggaagctgttttccaggcccagccctgccctcttgggtcctgatctctgagacagaagccgattttctggggtggccagcaggggacaggagaaagtgcgaagggccagctggtgctggaatagaacttcctgggtaactgagcattgaggctggccaggccggccctttgcttatgctccaggatgccccgacagtcagatggggatatgcactcagttatagaaactgtcagcagctttcccaagccgagaacagcgaggggagcctcgcagagggaggcgggcgggggcctgattgcagcagatgggccgcagccacatgtgcacgcacagcacatgcaggcccgtggtgcacacaggagagaaggctcacacaggagcagagcatctgtgcatgagagagggaggccgagggacaaagggagggtgaaagagaagcgggtagtatgtttcccagcacggccttccccagctgtcactttgaaggacctgaatgctgatggcgtccccattcagcctctgcccaggacaatgggcaatggagggtcctcttgtccttaagagccctgcccacctgcctgccaggcccctccttccttcagacagatgagtccgtggagctgtccggtccaccccgtgctctccccagcagctggacaccgccccctcctggccggccgcgtgcagccagggctgggacgacctgccgctccaccctgccccgcacctggcccactgcccgctcacctgcatgggtgaccaggcccaccaaggtcagcatggcccagaagctgccccaggacccaggcttggagtagcctctcctaggcatctttatgctcagcccccaagtccactggagggacggtgaagcccagaccactctgctcacatccctcttccttatataggatccggcacaaggggacggcaccccccttcctgcttggcctccctcccccactcagcctcctccatggattggtggaaactggccccagctgttgcccaggcaaccacttaagccagagagcggcagccccgggggctattgtgctgcctgtgggcccccaaggggaacagatccggaaccctcctcccccaatctccttaccacccagcagggctagccgtgcctctccctggaaagtttcaggctctctgcagaataggcgaggggctccaggaccactggcagccattggcctgagggtccccagttccctcccccaaccccaggcctcggccctggcacagagcacacttggcagcgtcgtgcctggagcaccatggtgagccggctgcaaaggaagggcctggaagaggaaaggagaggcggctgaggctcccacccctcccccactcccattttggggtggggcagctcctcagagagaagctcagagatctctcgaataggggcccatgggcaactgatgtcagtttcatattctttgttgaagaaggttcctggaatgctgtggggagggtgatgggctggcaggaaagttctgtggggactgtgactgtcgcctcccccaggggcaagctgagccaggtggcagggctgggcatagagcagatgcaccctgccccgtgcaccactgcatgggtgacccctgcccagagcggggctggccaccttctagctctgcgctccagccagcccaaggctggggactgtctgccctgctatttcctgacttgaattctccttccccaagtggcctcaggtctctgggttcacctccttggaaggcttgttttaccagcttctgtcttatttcccactgtaatttttccttttccaggctaaggaggcatgctgcagacctggtgtttcactcccaatgtaaggaaactgaggcagggagctaggttgcagtctcagttgggttagtgcagaggagtgctcttctaaaaacaaaggcaacagagagaggaaagtgagtctggagctcagcaaaagcgcgcgcgcatgtgtgtgtgtgtgtgtgtgtgtagggtggcatgctgtgagtcctcacctttgcagggagccagcagggtctgccccagttcttcgtgggagggactcctttgagcttggctaaccgaagtgggtgactcccaagggatctgactccgaggcagggctctaggttggggatgaattaaatcttcctctccctggctctctggatcccaggggccagctcgatgcattgatttctgcctctggctggcacagagacccagcagctccaccccctctctggagccgcagagagagcaagaactgggtctggcacctgcctcgtccgggttggcagagttggagctctccagcccagcggaaacccctccagctgccctgagtttcatgcctggctcccctcgtccaaatccactatcccttgcccactggctgcccgcctgcccttcccatgggctgtaccatgtcctggctcaacccagcaagtccaagtctccatgcagcagggcagccctggtccctgagggcatcccagcttccaagcacagtgctttcgataggaatgttattgatgataagagaacccgctactcagaaaactgtcgtttgatatttgtgcctctcaactccagcctccttcagcctctgcatcagtcattctttgttttgttttgcttttctagaggcagaatctctcagtcaccaaggctggagtgcagtgacacaatcatagctcactgcagcctcaaactcctaggcccaagcgatcctcctgcctcagcctcccaagtagctgggacaaaggcagtgccaccacgcctagctaattttgtgtcagtcattcttgaagggtagccacctgcattagaatctcccatgctccaccttggaaccaggattttcaggggcagggtctggctgtctgtattttctaagtactcccagacaattgttatacgcaccccaagacaagcgctacctactagagctagattggtggcatttcaagtgtgaaggaagctgggaggccctggatcatcaagaagacccggaagagtcacctctgactccccatctctgacaggccccacctcccattatttctaatctcccttatccctggccctcttcgaatgatttagaaactagctttccacatagaggcattctctgttctcattttctttttttctttttttttgagacggagtcctgcaccattgcccaggctggagtgcagtggcacaatcttggctcactgcaagctctgcctcctgggttcacaccattctcctgcctcagcctcccgagtagctgggactacaggcgcccaccaccacgctcagctaattttttgtactttcagtagagacggggttttaccgtgttagccgggatggtctcaatctcctgacctcgtgatccgaccgcctcggcctcccaaagtgctgggattacaggcgtgagccaccgtgcccggcctctcattttcgtaacagagcattgctggagtgtgtgtgtgtgtgtgtgtgtgtgtgtgtatggtatgcatgtgcacatgtgtgtatgcagtgcgtgtgtgtgcatgtgcctatttatatgtgtgtgcgtattgtgtgtgtccatgcatgtgcgtggtgtgtgtgcatgcatatttgtggatatgtgtgtgtggtatgtgtacatgcatatgtatgtgtgggggagtgtcctggggcgggagagaggaagccaggtatttgccctgagccctttttttttttcttttgagatgaagcctcgctctgtcgcccaggctggagtgcggtggcgccatctcagctcactgcaacctccaccttctgggttcaaacaattctcctgcctcagcctcctgtgtagctgggattacaggtgtgcactactatgtgcagctaatttttgtatttttagtagagatgaggtttcaccatgttggccaggctggtctcgatctcctcacctcaggtgatcctcccgccttggcctcccaaagtgctgggattacaggcgtgggccacggtgcttggccaagtctttgagaggaagaatctgcagcactgcatatatatatatatatatatacacacacacacacacacacacacacacacacacacacacacacacacacatatattggccccatggatctgggagcgccataattccttgaaggcaagtctgatgaattcacaagccagcaccatcctagagaggagtgttacttcccgccccagacgggagtgtttatagcccaagccatgtgtctgaggtcttatgaccaggaacctcagaggcaggatttatttttcgagttctgagttgtgcttgacttttcttttttctgatttttgttgttgttgttgttagatatggggtctcactctttcacccaggctggagtgtggtggcactgtcatagctcactgcagcctcaaattcctgggctcaagcaatcctccagcctcagccttccaagtagctgggaccacaggtatgaaccactgcacctggctacttgacttttctttccacaaccccatgttgtgtttttgttttgttttgttttgttttgttttgtttgagatggagtctcactctgtcgccaggctggagtacagtggtgcgatctcagctcactgcaacctctgcctcctgggtgcaggcgattctcctgcctttgcctccggagtagctgggactacaggtacccactacctgtagtggctggctaattgttgtatttttagtagagacggggtttcaccatgttggccaggatggtctcgatctcctgacctcgtgatctgcccgcctcggcctccccaaagtgctgggattacagatgtgagccaccatgtccagcccatgctgtctttttggggaagtttttccaattgtgataagtgatccctttggacaaggaatctctagtactgtaaaagcaacggaaaactcttgcaagcttgggaccagataaagagtttctgaatctgcaaagggggtgatcagacactggactgtggtaacacctcagaggggtgggctccagacgcagcctggccctacctggcaccctcccttgcatctgtagtgcctcctgtcctgacttagggttccctgagtcactgggccacttggactggggacaggagatcatgggtttaagttccaggccccgtgtacacaggggagcacataaaggtaaatatgaggccgggcatgatgtctcacacctttaattccagcactttgggaggctgaggcgggtggatcacttgaggtcaggagttcaagcccagcccgggcaacatggtaaaaccccgtctctactaaaactacaaatattagccaagcttggtggctggtgactgtaatcccagctacttgggaggctgaggcaggaaaatcgcttgaacccgggaagcagaggttgcagtgagctgagattgcacccctgcactccagcctgggcaacagggtgagactctgtctcaaacaaacaaaaacttaaataagaaggaatccttggccaggtgtggtggctcacatctgtaatcccagcactctgggaggccgaggcaggtggattgcatgagcccaggagctcgagaccagcctaggcaacatggcgaaacaccgtctctacaaaaaatacgaaaattagctgggcgtgttggtgcttgcctgtaatgccagctatttgggaggctgagatgggaggatcacttgagcctgggagttcgaggctgcagtgagctatgatcacaccactgtaccacagcctgggtgacagagtgagaccctgtcttgaggggtagggaggcagaaggaaaaaaaagagagagagagaccctggtgctcaggcctggtggctctggctggactgatcagggctgaagacttcagagaccaaaaaggtcaaggtgtggccgggtgcggtggctcacacctgtgatcccagcatttttgggagacccaggtgggcatatcacctgaggccaggagctcaggaccagcctggctaacacggtgaaaccccgtctctactaaaaatacaaaaattagccaggcatggtggcaggcacctgtaatcccagctacttgggaggctgaggcaggagaatcactggaacccaggaggcagaggttgcagtgagccgagatagcaccattgcactccagcctgggtgacagagcgagactctgtctcaaaaagaaaagaaaaaaaaagtcaaggtgtgcggctgggtcttcataacatctttcaccttgcccaggctggctcagaggtgactgccttagtggataggatcccttccaccgtgggctagcagcctaccctggtcactgacaccacaccatgtaggaaagaatcgccaccaccaagaaggggcctctcacctctgtataggctgtgtgctggctgatgacgtggttgccctgtcctgtctgctgctgccactgagctggacatctccaggctccatctcttgaaccatggatcccagcgttgttagcaatgagtattatgatgttgcccatggagcaaaagatccagtgggtccccacttccctgcaggacatcactgctgtcctgggtacagaagcatatactgaggaagacaaatcaatggtgtcccatgcacagaaaagccagcattcttgtctcagccattccaggtggctgaggtctccacaggtcacagggggaagctgggacctccgaataaggccatccaaggactccagcagtttccgccaggtgaatccagctgcctcccagaacaggccttctatggggtgggatggtaagttgctggaaggacgtgcatggggcatcattgtagcaaactcagtccccctcctccatctctccctctcctcgctctgaatccagggagctctagttttctgtgtagcctgtgtgacagccttggttgaaacccttgtgttccgtctgaagaatatttaaggtttccagtcaagtgtacatccctcaaagaaacaaagtgggcttggcatggtgactcacacctgtaatcccagctctttgagaggccaaggcagaaggaccacttgaagcctggagttccagaccagcctcggcaacacagcgaggccccaaactctctctatatctatacataaaatttaaaaaacaaagtgtagggacagggtgggcactcggtaaatgttggcagggaccctccttgcccctcacccatggcagctccttgaagagagggtcagcctcctctcacccctagcctcctgctgcaaggaggtggtggcctggggcgtcatctgtgctacttgcactttctggggctggggtcccagcactccaccagaggacctgccctgagcgggcagctccgtctccagtcccactgtgccacccagggtgcctagccaaaccatgggactttcaggcttgcagggtcaggatgtggccaccagggggcagcagggcctgcgctgtgagtatccgagggggggttgggatggggagttccaggctctgatgtgagatctaactcccagagctgggaagctccctatatttcctgccatattttctgctgcattcccagaggacaggccatgggaggtgattccaggggggcctgagctctcctcccgagaccgtccacggggcatccatgtcccgggtacctgcttgtgggctgctctggtcactcttcctctagggcaggagagccagtctggcctcttctgagtgcacaccagcaacggctgttgtttatttgccagggattgatattcttgagggatggtccatttcaccagggccagggaaacaacagcttgcaggactgtggtttcccagcaccggctgcaggcagcctcgtccggctgctcccagaggatgccccaccctgtgcacggctgcctgccatcctgcccctgggggtagcctccacctcccccaccatggccactgcaggactgaccctgtgcacctggtcccctgagcctcttgggatcatagccctgtctgtggcagccttaccactcctacctggcacgacttccccaactcctcacagaggtgccctactctcttccctttcagtctggatgctcatagagtcagcaccctgagtccttctgcctgtccccaaagtcctcagccccaggtttgaccccagctgaacacaggccagctcacagagtgccccggggcacgaggcagccccccagaacccccatcctgccatcctgcctcttctcctcacttcctgctcccccaggcatagacatacctgtgaaccccatgccaccctcagctcgtctctcctgaagctgaagcccctgcccagcccgaccccttcccctgcctgtgcgccttagagcaccctggtttgctccaccagcatctactctagctctttccccggtgcctccgcccaccagttccttcctcctccttcccccgccccgccccctgcactaacaggctcagtgtctgcgtaaggatcctggggcaaacaaccacttggagagccaaggggtgagaggtacagctggcgatgctgacagggagctgcggggaccctcagaaaaagccacaggtgacccaggactcagggccccagagcatggggcttgagggacgagagacaggtaaggcatcttgaagtggggtgtgctgggggcaataaggtggaaaggcaggagggaacaggaggcaggttagggacctagagggtggagtaggggccaaagctgagagtgagtgagcagtgagccccccggcctcagcaggaaacgaaaagctggagttcagcctgaaagagacgcgcagtgtggcttcaggggaacaggggccagagtggacggtgcttatcctagaccagccaccttacccctgtggactgagtttccccatctgtggacttgggccattccagctttagtggtgctcacctttgaagagggtatctttagtttagaaaagagggggccctaccaacagcctctccttagagggggacagctgttgagtggagctgtgcagacctggggcctccactgtggacctcctagagaggtccctgtgtgtggctggcatcacccgggtcggaatcacccaggttgctgattacaagcacggctgctgcaaccccgcttcagaccctctggcccggaggcggcccaggagcctgcacctcgacaagtgccccctgtttcagagcccctgctaggccgggtgagggcccatggggaggacccatggggagcaatggtctctatggcagcaggccgtgctgccagggacttcccatcagtgggggagccgggccactgagggagtggggtgacatggggtgggggtgagggtggtcttggcaagaattctcacagcaacagacagtgcactcagctgggtctgactagagggtctgcacagagcagggtgactagaaagaccccaggtcagggcggggctgcgcccagccaggttagaaatagaccagaggctctgactctgcccatccgcaccttctagctggccagccacgagtgaccctgctgcccacgccccacgtcagcgggctgagccaggagtttgaaagccactggccagagatcgcagagaggtccccgtgtgtggctggcgtcatccctgtcatctactacagtgtcctgctgggcttggggctgcctggtgagtggggagctggggtctggggacttgggcttggccagaaatggggatcctccttcaatgggtgccagtcctctgtgtttgacccctgaggccctggatcatagacccctggtctttccttgccattgtcagggtgttctgggtcactggaggggaatacaagtaaggggctaggattgggggtgctcacagctaaacccaagttttccccagcagtgagcgcactcttaggataacaaaattcacataggaactggctcagctcagtacaaagctccccgtgctgcccatgccttcagagagcagagcttggggcagaggtgggtgtgtggatatgggaaggacgggtggtctcggccctggggatttccccaagtctgatagctaaacccatgcctgtgtctagggacgcctccattctggaggacacagaaaacctaaaaaggacttggaggacaatgccataggacaggtagctttttttttttttttgagatggagtctcactctgtcacccaggctggagtgcagtggcatgatctcggctcattgcagcctccacttcccaggttcaagcaattctcctgcctcagcctcccaagtagctgggattacaggcatgcaccaccgtgcctggctaatttgtatatttttttaacagagacggggtttctccatgttggtcaggctggtcttgaactcctgacctcaggtgatctgctcgccttggcctcccaaagtgctggattacaggcgtgagccaccacacctggccaggacaggtggctgctgaggacccttccatgtgcacttacctgtgcataaccggggtacagccagtggcctgcagtggatggacagggcagagctggcctgggtggccttctgggcaaagtggggtttcagaaggatctggaaggagaaaaaagagaagccagcgcagcctctgcacatgcagatggggaggtgcgatggcgacaccttggaaagcagagtctgagctctcttctgatgcctctcccctccctcacctcggctgccctcagtcagcctcctgaccgcagtggccctggcgcgccttgccaccaggaccaggaggccctcctactactaccttctggcgctcacagcctcggatatcatcatccaggtggtcatcgtgttcgcgggcttcctcctgcagggagcagtgctggcccgccaggtgccccaggctgtggtgcgcacggccaacatcctggagtttgctgccaaccacgcctcagtctggatcgccatcctgctcacggttgaccgctacactgccctgtgccaccccctgcaccatcgggccgcctcgtccccaggccggacccgccgggccattgctgctgtcctgagtgctgccctgttgaccggcatccccttctactggtggctggacatgtggagagacaccgactcacccagaacactggacgaggtcctcaagtgggctcactgtctcactgtctatttcatcccttgtggcgtgttcctggtcaccaactcggccatcatccaccggctacggaggaggggccggagtgggctgcagccccgggtgggcaagagcacagccatcctcctgggcatcaccacactgttcaccctcctgtgggcgccccgggtcttcgtcatgctctaccacatgtacgtggcccctgtccaccgggactggagggtccacctggccttggatgtggccaatatggtggccatgctccacacggcagccaacttcggcctctactgctttgtcagcaagactttccgggccactgtccgacaggtcatccacgatgcctacctgccctgcactttggcatcacagccagagggcatggcggcgaagcctgtgatggagcctccgggactccccacaggggcagaagtgtagaggagggggcccagctagggagctcagggtggctcatggccacatgtactggggcctttgaggttgtacccaaaacacgtttatcaacagcttgctttccttgggtgggggtggaggctcctcctttgggtgtggctcccaggtagagaggaggacaacttagccagctcttatgtttgcttcaccagcaatccctatttcctgggaagatgaaagggcactgccaggcacaggctaatagcatcagtgctgtgggcattcctttgcggggggcattttgcctggctcatcgtgaatgccagattaatgttggttgaatggatagaaaaacggacagatggaggccgggtgcggtggctcacgcctgtaatcccagcacgttgggaggctgaggcaggcggatcacgaggtcaggagatcgagaccacagtgaaaccctgtctctactaaaaatacaaaaaattagctggacgcagtggcgggcgcctgtagtcccagctactcgggaggctgaggcaggagaatggcgtgaacccggaaggcggagcttgcggtgagccgagatcccgccactgcactccagcctgggcgacagagtgagactccgtctcaaaaaaacaaaaacaaaaacaaaaacaaaaaaggacagatggatggatggatggatagatggatggatggatggatggatggatgtgaattgtctccagcccacccccctttcctggtgcctgcttctcattccctgaatggatcacctctccagctcctagtggcaatgccagagtttgaaaaggaagatatcttcaggacttaaggcatttcttaggctggaggaaacaaagaaattgagctgagcaatgggagggggctgcttgggggataaaagcccccagggccagtcagaaaggggtgatcttaaatcagatgtgaggagcccaggcctgtgtctgtccagccacaggagacacagccccttaggtctcaaacaccctggttggattccacattactccctgccctaaaccagtacaggttcatgggcccagaaccagcactggggctatagtttttgttgttgccaatgaggagaaagaaaatggtctcttaacccagggtactaggagaacaggaaaggaggacctagctggagatgaccctgagcttctgctgagccccccgagctcacgccccttggggaaaggtcttttcctccaccactgggaggcgggagttggcagagtccatcagagccatgaggagctctgctccccaccctcagcctctccagggaggctctccagggcccctctctcctctcagcaccaccatcccggagaggcagctgggagagatcagcagatggaactcccagctgctccaggctgtgggtaaacacattagcagctgagctaggaccactttctgcttcctggtcaggctgagctgacctttgtcctgaatgggaggttcagacctgcccccaccctcttagtgggatgacatcagtcaaagagctgtttgtgcacccagcacacagtcaatgcagaatcaatgcttggctttccactttgcctctctgcttctccccagagcagggatgtccagacagggaggttcagctaacccagaaagaggataatgtgggtctccaatgcatttgccatgattctcaactccaaaaaactctgaaaaccaaaacatgtttccgaaatgtgccacaaacacgtttagcggcacagcgtgacccggtgtgaggtgatttctggtcccgaagttgtcctgtgattgtgagtcctgccagccccaccagggactgttagtggagtgatcatgtactgctgtccacaccccacggaatcgtgatcgaacgcgcaccactacatgcacacagcaccttcctctgctctgacgtattctgaattccaagacatgtggtgccgagttcagagaaaggactgaagacctgtaagcccaacacttctgctccggggtggtctacactgaccctgagcaggtgttaaggatggaggaccccctcacccgcccacacctccatgtgcacacacagatgtatccccaggcagggttgatgcacctgcgctttattctttgcttaaggaggagggggatgcaaatgcaggtacccggggagggagaaggtccaccggaggaccagataatgtcggccccagcccagcctgagcctgccctacagaagcgggcacgggaagaaagcacaaagttccatggatgaagaactaaatggaacaacctgcagggaccctgcaggagagaacccagtatcagggaagagcatctgtgtctccatggatggcaacagcagctgggtctaggccagaggcaggatgccttcctcagctggctggggggctgtctttcaggaggccagctgcaatattagctcaactgtctctgagcaccagtgaaaccaggaacttccagaaactgttggggaggctctttcaagacacagttttgttttgttttgttttgttttgttgacatggagtctcgctctgttgcccagtcgctcaggctggagtgcagtggtgtgatctcagctcactgcaacctccgcctcctgggttcaagtgactttcctgcctcagcctcccaagtagctgggactacaagcgcacaccaccacatccagctaatttttttatttttagtagagacggggttccaccatgttggccaggctggttgaaacaattttgcattgagccaccataaccccagtgttaatattgctataacctcacttgtaccgacaggctggggcagtcagtgactttttcaaacaaccctgcatatggagtattgtaactgttttacaaacttaggaaattgaggcacagagagattaaatggtatgcccctagcccaaagctggtcaagagcagcactgacactcaaacccaagtctcctggttcctggtccattgtctgttccaccccacaccttgcaggtgctctcagatgtagaagattagaggcagaccgctctcggggatcttttgcattgcttagaactttctagtgctggacttatcagatttgagaaccagtatcacattttcctaataaaatgcattaggtggtcaggtgtggtggctcacgcctgtaatcccagcactttgggaggcagaggtgggcggatcacttcgggtcaggagttcgagaccagcctggccaacatggtgaaaccccatctctactaacaaatacaaaaactagctgggcgtggtggtggacacctgtaattccaagttctcagaggctgaggcaggagaatcgcttgaacccaggagacggaggttgcagcgagctgagatcgcgccatagaaacaccatggaactccaacctgggcaacaagagtgaaacttcgactcaaaaaaaaaagagaaaaaacacattaggtaacagtttctttttagcatttgtgtaacctttaataaaataaagtgataatcaccttggtaagcatgtcactgaaatgtaaatgaaaagtattattaaatctgccaaactggcttctagaggagagaaagacttaaatggtttcagtttctccttcttcccttctccctccatagcctacccactcatctgctgaaatatcttagctaaagaaaatcctttttgaaattctgagtttctttcctaacaattcccaccacaggtttgatgtgctgtttgatcttacggtctatcatttgtcctttgttaatatctgaggatggttattgctcacatgtctttcatttcttcccaagggtatatatgatttttgctgtttggaagttggttgacaaattgttttctggactctattagttttcaagggctgcattaaaaaaataccgcagactgggtggcttaaacaacatatgagtttttgtttgtttgtttgtttgtttttgagatggagtcttactctgtcgcccaggctggagtgcagtggcacaatctcggctcgctgcaacctccacctcctgggttcaagtgatcctgctgcctcagcttcccaagtagctaggactacaggcatgcattaccacgtctggctaatttttgtattttcagtagagacagggtttcgcatgttggccaggctggtctcgaactcctgacctcaagtgattcacctgcttcagcctcccaaagtgctgggattataggcgtgagccaccctgcctggccagaaatgtgttttcttacagttctggaggctggaagttcaaaacaatgtattgaccaaatgtagtggctcacacctataatcccagcacttttgaaggctgaggcagggggatcacttgagcccaggagttcaagaccaggctaaacagcataggaagaccctgtctctaccaaaaatacaaaaacagctggatgtagtggaggatcacctgagcctaggaggtcgaggctgcagtgagccaagaccacgccactgcaccccagcctggatgacagagtaaagggcgaccttgtctgaaaaggaaaagaagaaggtgttagcagcttgggtttcttctgaggcctctctccttgccctgcagaaggtcaccttctccctgtgtccccagtacctcaaaatgggacggcatttgaagatagggccttgaaagaggtgatgaagttcaaacgaggctgttacgatgggctctcatccaacctggggaaggtcttcaacatatgaatttgggttgggggaaactatgggtattttaaggacaaatgttccttggctgtggatccaggctttaataaaagtcacttttctcttggctgtatacgaactatccccacctttctcttctccttggctggcgtaacaggactcaaagccagtctcgtatctttaaacatgatctctcctttcttcctggaagatcttgaagtttttgaagattcacccttgttgaacaggtacctggaggtgggccttttaatttccacactgagagtatcttttcattcagaaaaggttattttctttctcgttcgtttccttccttccttcctttcctccctccctccctccctccttccttccttcctctctttctttctttctgagtgggggttgcaccatgttgcccaggctgctcctgaatttctgggctcaagtgatgtgtctgcctcggcctcccaaagtgctggaattacaggcctcttttccttttaggaaacagggtctcgctctgccacccaggctggagtgcagtggcacgaccacggctcactgcagcctcaacctcccaggctcaagcaattctctggcctcagcctcccaagtagctgggaccacaggcatgcaccaccatgcctcgctaattttttgtttgtttgtttgtagagacgaggtctccctatgttgcccatgctggtctccaactcctaagctcaggcgatcctcctgcatcagcctcccaaagtgctgggattacaggtgtgagccacggcactggccttcttgactttcttaatcacaattgggtttcgggcccccttttccctcggccactcttatgtgctctctggcggggtgtcctgctgccactggcacctttcctggcttcctcattgctcagacctcaaacagctctttccctctgtgttgggtttcccagtcgctccggtttgcagtgctatcactgcacactcccccttagcagcacgtttctttcttttttcttttttttatgagatggagtcttgctctgtcgccaaggctggagtgcagtggcgcgatctcgatctcagctcactgcaacctccgcctcctgggttcaagctattctcctgcctcagcctcccgagtagctgggattacaggtgcgtgccagcacacccagctgattgttgtatttttagtagagacaggggtttcactgtgttggccaggctggtctcgaactcccgacctcaggtgatctgcccgcctcggcctcccaaagtgctgggattacaggcgtgagccaccgcgcccggcctgagcagcacatttctttttgtctctggaatggatatcaacgcaaccaggttgcttccggggcatggtctcaggccccaccacacacgcagcctctgcccctctctctgactcccatgctcactttggtcctcccccatgagtgctctgctcctcttccccttcccctctttttttcagtccgaaagaggaggcatgctggctggataaaagggagccacatctgtcgcttctgctctgggatctttcatgggagctccagtccacagacatgagtgtccctcgattctgacaaggtgacaaggctcccttcctgtcaccatgcccgggccgaggaggtggctttaccagtggtggggtgggtgacatgatggggacggggagacaagcttccagagggatcgtgcagaatccattcagcaccctggcccagaaagcaagaccatattttccaaattaagcatttagccagctgggcacagtggttcaggcctataaccctagcactttggaggcaaggcaggagaatgacttgagaccaggtgttcgagagcagcctgggcaacgtggcgaaaccctgtctccaccaaaaataaaaataaaaaaaatttagccgggcatggtggtgggcacctgtaatcccagctgctcaggaggctaaggtggaaggatcacttgagcccaggagtttgaggctgcagcgagctgagatcacaccactgcactccagcctggacgacagagccagacactgtctcaaaaaaaaaagaaaacattgagcactttggttggccagattacagaggtgctggctggcagggaccaagggacagcccttggcatgggggtgtcttggaaatcttgcttccctggcctccttgtcgctgggggtggcctgagctccctggcgggttttctgcccacctcctccttttgcatgtccctgtcagctcagacagcagggggcgctgcaggactggctggacggtcgggccagggagtgggagggcgggcctttaagccaaggttcaaaggaagatcgagttactgcaaagaaactgcctgccctgggccagcagccagcaccgagtagttgggtgggagggctttgtaccctctgtcagtctcctccaccctaaagccacgtctgccacgctggggctggccagccacggggctgcagggccctgcaattttctcagatgactttggtggtttcctgtgcagagtggtgtgaagggccctttcatcgttcatcgccctcctctctccactctccttcgcagggtcctgccagcccctcctgctggcctcgggttctgctcacctgccttccccactctggggagcttggcctgccaggctgcggagcctcagggcttcagtcagcgtctctgggatcccaggaccccgtcctcccagcctggcgtgaggggccgagtcctcccatcccccagctgagcctgggcaggacttgggtacccccacttcccactgctccttccagcctgccctctctccacggtgctggaggtgaaagagttaatcacatctgtggcggctccttccaggactcctccaagatatatatttagcaggcggggcggggtggggcgggagaggcgtgccaagatgccctggcaccgcagcccctgccttaccacaccgctcttcggagggaggggcaggcaggcagtgccacaggagccgggtaggatggaggaagggacccatctagatggagggaaggggcaggtacgggagttggctttaagtggctttaaccacagcctagggaaggctgcggtctcagagaggactttgaggccctgtgtgtggggttgggggaggagcttgctctgtatccatgaaagaagggcccagtgactctgtctcccagggatgtcgaaggattgtggaaaagggctggaaacagcttaacggtgaaggtgatggggcagggctggctagaagagcttctaccacctattgaaatggctgggacccctgaccagggagcaccgtgggagcatagccctggccagtccaggtgaccaccctctcagagctgtgctttcattctgggacagcagctctggtgtggccagtggagacaagggcagacaggtttttctatgtcctccttagagattatttccaaggactctgccctcagggagagcaatgtattcagtaggtaaccactaggcgggactggttgctaagggctgtattttgactctaagtggggaaacctgtgattcaccttattccaattcctccaagtacctgggacctctggaggttcagttcacaaggaagacgtttggtttgctcgcttgcttttttaacgggagtgtctgtacccttccctaggtcccaagaataactctgcagatcttggcttcccagcctcaggattgtccccagggaccaggacaaagggcttggtcctattggcttgtctccatggcgcctcccttcttcttcttcccaggtgaatggatcagctcagttagacccaagagagcctcatgcttgtcctagacctcattttcccgacccagtggcattccagccacacctgctgaggccttgggtacctgcgcatcagagtagcagctcctccagctggcagagaaagacttgatttgccacagttagcgcggcccactgtggaagcaatccagggttcgctcaccacccagccatgccagctgatgctgttttgattcccctaaccaggggcagtcacttttctagaactttctgtgtcatgaaccctcaagggaggcagctaatgcaaccctttcccaaagggccctctcctaatacctgcaaattataaggacactatttgacttgatattatttctggaggaaaataaaagtcaataaaggcacataaactgctctgtgatttgaggcaaaatgaatacaaaagccaggcccttctgccacacccactcaccacgtgatcttaagagagtcgtttctaatctcagagtctcagttatcttgcctgtaaaatgtggaggttgagctacattaaatctatggtcacttctcttacccagcttcgtccaggcacggtggttcacgcctgtaatcccagcactttgggaggcctaggcaagcggatcactcaaggtcaggagttcaagaccagcccggtcaacatggtgaagcgccatctctactaaaaatacaaaaattatctgggcgtggtggcgggtgcctgtaagggcaggcgctgaggtgggagaatcgcttgaacccgtgaggcagaggttgcagtgagccccgatctcgccactgcactccagcctgggtgacagagggagactccgtctttaaaaaataaataaataaaataaaataaatgctaccaaacttacaattccccgtgaagcacctaagccttagttcagagtagaagcaggagaaacagagctcactgatgggaggcacctaacagaatacagacagcctgtgagcatctccatgtgccaggcactgggctctgtgtttttttgtctgtttttctttatttagagatggggtctcgctatattgcccaggctagtcttgaactcctggccccaagcaatccttcggcttctgccccaaaaagtgctgggattacaggcataggccaccacacccacctcccaggctcactttctttctttcttttttttttttttttttttggagatggagttttgctcttgtcacccaagttggagtgcaatggcacgatctcggctcactgcaacctccgcctcctgggtttaagcgattctcctgcctcagcctcccaagtagctggaattacaggtgcccaccaccacgactggctaatttttgtatttttagtagagacggggtttcaccacgttggccaggctggtcttgaactcctgacctcaggtgatccacccgccttggcctcccaaagtgctgggattacaggcgtgagccagcacaccccgccaggcctagtttcttatatgcactgtctcattccattctcacaataaccctacgaggcaggaattcttgttatttccattttatacatggacatactgagggccagagagtttaagcaatttgaccaaagaacactagttagtggggaaaacaggattttaatcggccggttgctctctgccttctgtacatctcgccattgtgtgcaaggcatagggagatgctagagttagcagagcctggatctagaaggcaggttcaaggtgaagtcagtcagtcttttgtgtgtctcagcacacaggagcacataccccttaactctaatgctgggagttagataaaaacgatgagtagtttggtgtggccgggacctagtgggtagaaagggggtgatggaagataacgttggaatgatgggctggtactgacactgaaggtcttcatacagcacactgagctcctgatggttcttaagggtatgttctagaaagatcctgctggtggtattagggaggatgaactgaaacatcaggaggccggagaccccttaggaggccagagggatagcccaggcgagagacagggaggccagggagcagctggagggctaccagaagcctctgcagggtacactgggtttggaggagacctgggggcagagggagggaatgctcacaccctctgtggtccctggaacacttctagcaagaaggaggattgtgcaagaggcttagagagagaagcagcagcgctccactctgtcatgacataatcccctaggagatttgagaatgggggcttcagctacccctccccgtgagcatcctgtgtccatgggggcttagccctgggtccagagtttcagaggtatccctctgggctctggacatgtacccagaggtggtcggaagggaagggtgattgagatggacagagaggcactgccctggccggcctggtagcctggccccaccctctgaggctcttcttgcttgggcccccttgccccacttctttctttcttttttttttttttttaagacagaatcttgctctgtctcccagactggagtgcagtggcacaatctcggctcactgcaacctctgcttcctgggttcaagcaattctcctgcctcagcctccatgtagctgggactacaggcgcccaccaccacgcccagctaatttttgtatttttagtagagacagggtttcgccatgttggccaggctgatctcaaactcctgacctctggtgatcctcccaccttggcctcccaaagtgctgggattacaggcgtgagccactgcacctggcctatttatttatttatttatttgaggctgagtctcgctctgtcgcccaggctggagtgctgtggagtgctccctgcaacctccgcctcctgggttcaagcgaatctcctgcctcagcctcccgagtagctgggactacaggtgcccaccaccacacctggctaattttttctatttttagtaaagatgggatttcaccatgttagccaggctggtctcgaactcctgacctcaagtgatctgcccgcctcggcctctcaaagtgctagaattacaagcatgagccaccgcgcccagactccctttgcccttcttctgatgccaaggggcgcagggtcctgtccttacagggctcgagtggctgcatgtgaggaggctgctccacaccagtgtccacgccagagctcggctcagtggcctggaggaagctcccacggtgatgtggagtctccagctgctctcctgcccgtggactttccacctcatatttctggagttctggactctcaccagctcttccacactccctcactcctctactccaacgtggaaataaacagagaacatgaatgagaaggcgcaaaggccatgattcagggcttgctgggtaacaagggggcagccaccaccacctgtgtttgagagggactcaaaggcgggcggggtagggaagctctcgggtggcgtaagccaaaaagtatctgtgacagaactccatcgattcagaggattatttgccaaggtcgaggacgcgccagaggaagagaaacacgagttgcagtaggatctgtggcctgtgctttttcccaggagatttgaggacttcaacatttaaagagggggctggccgcggtggctcatgcctataatcccagcactttgggaggctgaggcaggaggatcacctgaggtcaggagtttgagacccggctggccaacatgacgaaactccgtctctactaaaaatacaaaaattagctaggcgtggtggcaggcacctgtaatcccagctacttgggaggctgaggcaggagaatctcttgaatccaggaggcagaggttgcagtgagccgagatcacgatactgcactccagcctgggcgacaagagcaagactccgtctcaaaaaaaaaaaaaaaatttaaagagggaagagcaggaaggaagggaaggaagaaaggacaaagggagggagagcaggcagcaggggaaggaaaaggaaaagggagggagagcaggcaatgagggaagttgttatgttcctgtgaggctttgattagtactcactgaatccacattttacacaggaaaagaggtgtgcttaataaatatatgttttacgtaagataaagtaagcatgtgagatgacagctggctatttgggaacaaaaggaaggtaagtttttgtttgtttttgtgtgactcagccaggcatgggggctcccacctgttatcccagcactttgggaggccgaggcagggggctcacttgagcctaagagttcaagaccagcctgggcaacatggcaaaaccccatccctacaaaaaatacaaaaaattagcagagtgtggtggcatgcacctgtagtcctacctacttgggaggcttgaggtgggaggatcacctgagccgggaggtcaaggatgcagtgagctgtgatcgtgcctctgaatgccagcatgggtgagaatgagaccctgaaaaaaaagaagaagaaggagaagaaagaaaaaagagagagaagaaaggaaagaaagaaagagagaaagaaaggaagaaagaaggaaagaaggaaaagaaagaaagaaagaaagaaagaaagaaagaaagaaagaaagaaagaaagagagaaagagagaaagaaaagaacagaaaaaaaggaagaaggaaaggaggggaggggaggggagggggaaaggaaagggaagcttcaggtttaccttgatggaggctgtgggcctaggaagctggaagcagctcactagaagaggacagggcatcctatgggattggttagaggggcatacttggctttacttttttttttttttttttgagacagtgtctcactctgttgcccaggctggagtgcagtggtgccatctgggctcgctgcagcctcaacttcatgggctcaagcaatcctcccacctcggcctcccaggtagctgggactacaggtgtgtgccaccacacctggctaatttttatattttttgtagagatggggtctcactacattgcccaggctggtctcaaattcctgggctcaagagatccacccgcattagcctcccaaagtgctgggatcataggtgtgagcccctgcatccagcccatatttggctttttcttggaaatggggataaattggaagcagggatgagaattagggaaactgtcgattacaaatcaagtcctggccaagtggagtcaattggttgacttcttggaccagtcattagaactgatcgcctgacttccgcaagtatgacttgtagctagcagacagcaggctggcttcctgggctggtcgttgtagaggatggcggggcttcctgggctggttgctgcagattgtgggtcagagatctatttttatgtctggtctggccgctggccatttgtagagtcagtctctcaccagcaatctgtgattatcatcctagtttttcagacaagtaaactgggaatcagaaaagtgagctgacgtagctaaggtcacagaactagtaagtttcagaacctggacaggaatctgccggtctcagccttccgcaggcaaagttcacagctgactcatttttgcctccttgtctcccactcttaattaccccagtactttgggcatgttctcaataagtatttattgaatgaatgaatacaaatttttatgacgtcagtgaggaaaccagagaggaaagccagaagagagtgaggggtcttcgctgaggaggcccctgtaatgagaacgacgccgctgggttctcttggccacctcttctctggcatcctgcaagaatcccaggtccttggttggagcctggaaccactggctgagagacttgtgggtctgggccagcttggccaggagggacctggcgttggtttggaagggtgagagtcgggggagcctgcaccccacggggttacattgttataattaacatactggggacggctgtcggatctcactgagaggaggggcagtcaatggtggggaagggcacttcctcccaggagccgcctggggatccaaccaggtggggagggtcaggagcctcaggcactacggaaggcagaattctaagcccgtcccatggactccatccctgtccccagagttactcccttgaccatattatagggctacacagtgaaagggatttatggtgtaagaacggtaccccagggaaacagcggtggctggggaggtcaggtggacctggggggccaggtgtccaggctgcctgtcccaccatgtcccggactggcctcatggccctaggcccctccctaagccccagtttctacatctgcgaagtgaggcgctggcccaagtaatctaaccctacctgttgtgatccagattcttttgagccccagggaggccaggattaaggccggctcccctgggttccagccgatcaggggagtgtgggtggtttctcgggcctgtggaaggaaagaagccgaagaaatcactcttgaaaagtggccgctatacgagcgggctggctgggtgatccctgtggcattctggtccctctccctcctgcctcagttcctctatgacctcaagatggaagagccacacctacaaagaaaaaaagactatctgtgagaaacaggtgtgcgtgttgatttttccaagggcttggctcagctttgggctgaaaatccccaggccatccacaaggggtgtggtcacaacccaataaagacttcagtctcagagcctgggaccatcccatcaaccacaaaatattatacaggaggagcatgagccagggaggggagttggcccctcaccgcccccacctcagtaggtggcccttctgactctgcgctgctgctgcaggagatggcaacacgagggtctccgcatgcagcctgcaggcgtctcagcttcatgtcctcagcctcctctcttccttcttttctccagaaaggaggccagcagaaggcttgggccctgaaagctaaagggaaaggaatgcaacctgggctgggcaggagcagaaggagagaggaaaacagtagagggtttttttgttttgttttgtttgaaacggagtctcgcactgtcacccaggctggagtgcaatggcgcgacgtgatctcagctcactgcaacctcctcttcccaggttcaagcgattctcctgcctcagcctcccaagtagctggaattacaggcacctgccaccacccctggctaattttttgtatttttagtagagaaggagtttcactgtgttgtccaggctggtctcaaacacctgacctcatggtccacccgcctcggcctcccaaagtgctgggattacaggcgtgagccaccgcacccagccaacagtagaggtttgaagatgtgaagatggagtccctgggagaaagggggccttagtggtttagaagccagaaggtttagaggaaatgggatgaaaacatgcaaaaacgaaggagttgcgagacaaaatgcttccctgacagagctgcttggttggtaacaactcaaatttggcaaaaggcaccttggtttcatcctagcatctacagtgcttatggtccttactgggaggagagggagccaggtccagaaccctctgttgcctctctgaggttctagcagcagttcccaggctctctcctccaggctctggtcaatcggataccttcctttggcttcgaaagggcagacacatccagccacaccagtcttactgcccttgctgtgctaaatcctgtccagctgacaccgcagtttctgggccccacggaatcttggctccccgggctctctgaccactcacaccccttgttcctgcagacagtcctgccatgcctcttgctatcccagagggaagaaaaggccacaagaccaagtagttgactttgcatgggagtttcgaattaagttgtttgactgcaaagaggagggcccttttcaaatcttccaggacctgaaactcgacaaggaaggggaatgccaaggttgagtctgagatatcagctcatgagccagaaggagaagggagctgcgcaaatggttgttctgctcagtggggccccagggcgaggccctgcagctaagaaaacgcttttggtggttttcgctgcaggtgcctacattcttgtgtaactgtaggggagaggggcctgggtgaggggagaggaggctcccgcttggccttgctacaaataatagcattgaagggagctagaagcacgttaagcaaagccctggaaacgcgttaagggcagactctcaaggaatctggatgcccacagccaggcaagaggccaggttgagagatggttgtgggatgccccgtgagcagggtcctccccctcctctttgccctgccctaccctgcccaatatcaggctatctgcgggggacaggccaggagctgcctctctgggctgggcaccatctgggtggccaggaggtgagcccgggaatgcccaggaagagccaagtcctgaagtcactgtgcccaggcctgcccttccctaagagggggtatggggggagtggggaggcaagcaggtgggagattggagaactccaaggctgtcttcagggcatgagaccagagtttgagggtgggggagtatcagggaggcaggttggggccattagtgggtgagatccctggtagtgggaccaggcaggctgtatttatcccgtccttccttccttccttccttctttccttcctttctctttctctctctttctctcccccttccttacctccttccttcctttctctctttcttccttccttctttccttcccttcttttactttttccttcccttcttctttctttccttctctcttccttccttcattccttcctttctttctttctttctttctctccttccttcgtctctcttctcttcttattttcttcctccttcccttttctttctttctctcttcctttccttctctgttccttccttccttccttctttccttcctttctctttctctccctcttcctctcccccttccttacctccttccttcctctctctttcttccttccttctttccttcccttctttttctttttccttcccttcttctttctctttccttcccttctttttctttttttctttctttctttcctcctctcttccttccttaattcctttctttctttgtttctttctttctctccttccttcctttctctctctcctctcattttcttccttccttcctctttctttttctttctcttcctttccttctctcttccttccttctttcattcctttctttctttctccccttcctttcttccttccttcctttcttctctccttattttctttgcttttttttttttgttttttttctttttctccttattttcttccctcctctttctttctttctcttcctttctttctgtttttatttttatttttattttttgagctagggtctcactttgtcacccaggctggatggagcacagtgacacgaccacagctcactgcagcctccacatcccacctcagcctcctgaatagctgggactccaggcacacgcccccgcacctggcgaatttttaaattttggtagcaacttggggtctcactatgttgcccaggctggcctcgaactcttgggctcccaaagtgctgggattccaggtgagagacaccgcactggccaccaggctgtatttcttttgggttcagagtgctccgcacagtcttgagccccctcttcaggatgtacggtctccatggggctctgagggtgtttgatgaaatgtacaggaagccattggcttgggctgagctcctgcacgaggcccagcagaccaaaccgaaatggaatcattcatgctgaagttctgcgtcacccagctgacactaagttgtttatctgacattctgagacatcaggagagtgagggataatagccagatccccaaacaggccagttttagccagcatgataaggaagtcccctctgctttaatcttacaaggaaaataactttgaaatctgatgtttgttctgtttctgctttcaaagccaacctctactgctcagctcaatccgaacactcattctatagtgtaaggtgagatattgcccaattctagaatccaagtaaaagccaattaagatctttaaatttgttgtaattttgtcttttgacaagagaaaggagctttcagggggaggggccatttcctctctgtctctagatctcctgtgtatatgggaagagctgggaccaggcccagcaattacctcaccatggttgggtgcaaccaagtggggcaactctttggccagaaagcaaaagtctttttagcttcaatgtaggccattctgggtcccagacccacagctttggacattatgggaatcagaattcttagatggcttcacaatctctgtccctgggtgtgttactcccttgatgatattatattatatggcagaagggatctgcagtgtaattaacattaccaatcagttgatctccaagtaggtcagttatctgagtgggctggatctaatcccacgagcttattaaaagcagagagtttctccaatagcagaagggaagtcagagagattctaagcacaagaagaatgggatgcacgttcactggctttaaagatgcaggaagcattacatggaaaggacttgtgaacagccccaaggagctcagagagacgcccagccaacggccagcaagaaaacaggaacctcagtcctgcaaccacaaggaagtgggttctgtcaacaacctaagtgaacctggaagtcgattcctccctagagcctctggatgagagcccaggctgaccaacaccttgattttggcttcctgacatcctaagcagagatccagtgaagcctgccccagatggctaacctacagaaccgtgagcaaataaatggctgctaaatttgtggcaatttgttatgcagaaataatacctaatacaggtgcctgcacagtgaaggttccagggcatggatgttgatcccaggggaggaggcaaatgaggccttctgatttctcccacagccttgaaattgcagcctcaccctgcactctggctgtgcccctcctccacagagaaccgtccacatctttgctcgcacggtttctgccagaggcccaagcttctgtgctcaggctgggaagtttgggcatgaactatgtacagataaaccaattgcaggggaatcgcacagcttcttattatcattatccaggtttcttattagttttcttctctgttaattttcccctgtatttctgcccagttctgatgctgttggatcttccaatccttggcaaaaggaaaatcctttttagcaagttactcaggcaggactccctaattaaagacccagagtggccaggcgcggtggctcgtgcgtgtaatcccagcattttgggatgccaaggcgggtggatagcttgagcctaggagtttgagacgaacctgggcaacatagggagaccctgtctctacaaaatataaaaataaattagctggtcctggtggcatgcacctgtagtcccagctcttgggaggctgaggtggaagggtggcttgagcacaagaagttgaggctacagtgcactatgatcatgccactgcactcccgcctgggtgacagagtgagaccctgtctcaaaaacagaaactcaaaatgacttgctctctctcccggtcttgtgacctaaatggcttgatttaggacgtgtggcagagatggttagctgtctaccaaaatctgcacacccctttcatagcacagtattgtcactaagagcagagactacatttcccagctgcctttgcaactgggtgtgtccacgtgacaaattcctaccagtagaatgtgagcagaaaagctgtgcagcccctctgagccaaggcatcagaagcaggtgtgcttcctccatcacttccctcctctttgccagctggatataggtaccaacgagaccctggggaaggggagagccctgagatggaaggagcctgggtccctgaatcaccacgtggaggaaagccactgaccaatcaggaacgctcgtcttggtctgttatgtgactaagaaataaattcctaaggtatttgagctattatacatttgggagtctatctgtgactgctttttagcttacccttcataatacacatccctctttggcccccagtgtaaatcaagttgcacaaggtgctgactaaactcccaggatgaaaaccttcaaatatccctgtacctcactttcctcggctggctcccatccctgtcttggttcacactgcttgctccaaagtctggctgactcagctggcctgggccatcatccatctgctgtcaaagagtgcctggctcacagcaaaaagaacatttattcccccaaaacatagggttctttttttcagcaaaggtggtgcagcaatatatttggagacgcagactgcgagtcagcacatgctcccggttcccttgggacacagtcagggagctcatgtcttcagccccagctcccccagcaagagcctccagtggtcggaggagaggagagaagagcagtggagagggggaggaaagcagaaagaggtgacaattctctcagaaagcaattaagcatttcgtggtggccccagggacaacctcaactttttgtgtttttcccccagagagactgaagaactggggggaggagagcatccctagctacagttattgaaaactctgcttggtaatgtggcattgagagactctgagaagctggcttcaggaaggtggccccacactgcctgcccaccacctgggatgccacctgccgcaacggtgttggtctctggtcagggctggggtaaagatcagcagtggctcatcttccctctgacacagcagcatgggacacctggatggaactgaaatggggtcccagatacagcaaacctctctccctgtccacttctgaagtccagctcgggattgccggccccagcagagcaggcaggggagctttgactgtggatggtgtttgagcctagactaggccccagggtcttcaatgaagctcacagatggaaaagcccagcaaccaggggtcagaggccctggaagttagaaaattacaagtccccatccttcaaggagctccaggatgactctgcctcagcaatttccagtgcaaatttactttttgtttgagtcaggaaataacaggctgcagactccctaggggcccaggaatccagccaccagcttctcctggcttctctcatccttccgtgagcaagactcagccagacgtacagggtggccccgagcttaaattacaaccacctgaccagagctgccccgcagatgcccagaccctgcttagagagggtccctgtggagagaggggcttccccaggcctctggctggtcgcatgcgtggcctgaattctccatgcacaggcaagaggctgtctctacttcccaccctaggcaactcttagcactaaccctgaagtgacgatgagccacggagccagggtggaagctacacagtgcgtctcacgtgacttccagtgagagctgttcccaagtttaccatccctcggcggtggctcaccaccctctctgcccaaagtcctctcaatagcctaagtctcttccctccactcagcctcattgctctcattttgtcacttagagcttagtgacattttgctttcttccaaatcctccttcttgcagtctagctgggtcctttcatgcctagtttacaaagatgtctggcctgatccctatctgccagcccctatccctcccagggggaccaggaagcctgggtttgacaggtgcaatgcacaggtgccgggcgcccactgggagtgcaggaggccaaggtcttcccaggactggcagctcagatggcccaggcagaaataacctgagcctgctgccctttccttcttgggagtgactcagcgagaagccggaagatagaaacacaaatctggtcctggatcttgcagagccagtcacaggcaaggccacagccttaaggctgtgtacggagaggacctggagccagccatagggctggacgctgaaaagacgctcaacctcatttagcaggagacaagtgcaaatgaaaactatacccagaccccattttccacagagcagattggcagagatgcaagctttcaggacacactcacttggcaagaaggggaggccattctcccgctttgctagcaggctgtaaaatgatacaatctcctcggaaggcaagttggcaatatctatccactaagtgcacaaattctttgacccagcgattctacctgtacaaacggaacacctagctatgcgtgcacatttatgacatgacccaggcagcattgtttgtaataatgacaaaggattggaggctcctacataggtgactggttccacacttgcggtgtccccatgcgatggatcacagtaggcagaacagataattggaaccattgatggacgagtatggaaccgtgtcctagatacattggaaagaggaaaaacaaaacaaaagaaattgaggagcagaacgggctgtggggctggctggtttcaattctcgatgaatggatgaaatggcacactcccatttgggtaaaggagggtaacagagaagcaatgtctatgctggtctaatgtgtgtgctaaggaatatctccggatggataccccagattggtttcattagctatacagaggcaagcatatacctttttgtaacttgagcattttaaaatatgttagctgggccgggtggcacgtgcctgtagtcccagctacttggaaggctgaggcagaagaatcactcgaagcctggaattcaaggctacagtgagccatgatggggtctatgaatagccactgcattccagcctaggcaacacagtgagaccctcatctctaaaaacaataaaaattcaaaaaatttttttgaactaggcaaacatgttacttattttaaaaaaataaacagtttaaaaggtgaggccaggcatggtggcacacgcttgtaatcccagcactttgggaggccgaggcaagcagatcatgaggtcaagagatcgagaccatcctggccaacatggtgaaaccccgtatctactaaaaatacaaaaattagctgggcatggtggcacttgtctgtagtcccagctacttgggaggctgaggcaggagaatcgcttgaacccgggaggcggaggttgcagtgagccgagatcgcgccaccgcactccagcctggcaacagggtgaggctctgtctcaaaaaaaaaaaaaaaaaatggtgaacccctggctcggtaatggaataaaatgacaccagtacttgagaggcaagcaagttccaggatagaacgaggtggtggagggaagcgatcattccattttacattcatattttgcaaacagtttctccttttctgttgctgctttcaatccagaggcagtcctttcttttcagatgaagaaatggaggctcagagaggggaggtgactttgtggaagtcacacagcaagtggctgagccaagactcacaaccaggtatttttgttttgttttgttttgttttgttttttgagatggagttttgctcctgttgcccaggctggagtgcagtggcacgatctcagctaactgcaacccccacctccctggattcaagcgattctcctgcctcagtctcctgaatagctaggattacaggcacccgtcaccacatctggctaatttttgtagttttagtagcgatggggtttcaccatgttggccaggctgatctcgaactcctgacctcaggtgacccacctgcctcggcctcccaaagtgctgggattccaggcatgaccaccacacccagccttgttttgttttgtttatgagacagggttttcctttgtcacccaggctagagtgcagtggtgcaatctcagctcactgcaacctctgccgccagggttcaagcaatcctcctgcctcagcctccctagtagctgggactacaggtatgcaccaccacacccggctgatttttgtatttttaatagagacagggtttcaccatgttggccaggctagtctcgaactcctgacctcaggtgatccttcagcctcagcctcccaaagtgctggaattataggcatgagccaccaggcccggctgcatccaggttttcgggctccccatcacatggttttttctacctcactctatagcagacaagacctggggtcttgggtcactgctatccccatttccacctagaacatgatctagaccacagtacatatgggctcaggaaccagctgtcagagaatggcgtcagattctagctcagctacatcctacctgagtgacttttaggggagttactttttggactgtgctgtggtctgtttgtgccccacctaaattcatatgttgaaacttactctccaatgtgatggtattaagaggtggggcatttgggaggtgattagtgctcttataaaagaggctggagtgctgggtgcggtggctcatgcctgtaatcccagcactttgggaggctgtgacgggtagatcacctgagattgggagttggagaccagcctgaccaacatggagaaaccccgtctctactaaaaatacaaaattagccgggcatggtggtgcatgctgtaatcccaactactcaggaggctgaggcgggagaatcgcttgaactcaggaggtggaggttgcagtgagccaagatcgtgccattgcactccagcctggacaacaagatgaaatactgtttcaaaaaaaaaaaaaaaaaaaaaaaaagaggctggagggagcttgttcacttttgccctgtgaagacacagcaagaaggtgctatctttgaagcagagagtgaggccaggtgcggtggcttatagcggtaatcccaacactgtgggaggctaagaggagaggatcacttgagcccaggagtttgagaccagcctaggcaacatgacaaaaccctgcctctacaaaaaatcccaaaattagccagatgtggtggcacatgcctctattagggaggctaggttggagaattgcttgagccccaggaggttgaggcggtagtgagccgtgatcacaccactgcactccagcctgggggacagagcgagaccctgtctcaaaaaaaaaaaaaatttttttttcctttttcttaattcacctccccttccttatttctatttacttttaaatattaatatatagtaaaactggccaggcacagtggttcacacctgtaatgccagcactttgggaggccaaggagggcagatcatttgaggtcaggagttcaagaccagcctgggcaacatggtaaaaccctgtctctactaaaaatacagaaattagcctagatgtgatggtgggtgcctgtaatcccagctactcaggaggctgaggcagaagaatcacttgaacctgagagatggaggttgcagtgggccaagatcgcaccactgcactccagcctgggccctgggtggcagacagagtgagacactgtctcagaaaataaaaatatataaatataaataaataaataaaattaatatatagtaaagttgatttttgttgttgttgttgtttcgatttgcataatcaccttcacaatcaggatacagctagttccatcgccccaagaaacctcctcaagagtccccttcagggagccacattctttccccaccccagcctctgcctagaaatggctaacatgttctctgtaattttgtcttcttgagaacgtcatagaaatggacttttacgtgatataaccttttgactggctcttttctttagaataatgcctttgaggttcatcgcaggtgttgtgtatatcaatagttcatttcgtttaattatggggataccatagtttgtttatccattcattcattgaaggacatttgggttgtttccagtttttggtgattatgaatagagctgctatagatatttgtgcagaggtttttgtgtgaacaaaagttttcatttctctaggcagtaattctcaactggaggcaatttcgcctcccatgggacatttggcaatggctctgacatttatgattgtcaaggcgaagtgctgctggtatctagttggcagaggtcacggatgctgctaaacaacctataatacataggacagtccctacaacaaggaatgatctggcccaaaatatcaatagcactgaggctgagaaaccctggtcttgggaatacacagaactgaagttgttggtcatgtggtatgatatggtttggctgtgtctccccacccaaatctcatcttgaattgtagttcccataatccccatgtgtcatgggagggacctggtgggaagtaattgaatcatggaggcagttagccccatgctgctgttctcatgatagtgagcgtgttcttacgagatctgattgttttataaggggctttcccctccttcgctctgcacttctccttgctgctgccatgtgaagaaggatatgtttgtttccccttccgccatgattgtaagtttcctgaggcctcccgagccatgcagaactgtgagtcaattaaacctctttcctttataaattacgcagcctctggtatgtctttattagcagcatgagagcagactaatgcatgatacgtgtatgttccactctataaaaaaattgccaaactgttttccagagtgactttaccattttgcatttccaccaacaatgttgaaggttctaggtgctttacatctttggcagtgtttgacattgtctatctttttaattttatccattatactagacatgtggtggtatctcattatgcctttaatttgcatttccttaacggctagtcatgttaaatatcatttcatgagcttatttgccatctgtgtatcctctttggtaaagtgtctattcaaatcttttgccccttttaaagttggatttctttatttcttactgttgaattttaagggttctttatatattatggatgcaagtttctttgtggaatatgtgatttgcatcttctctcattctattgtttgtttttccattctcttagcagtgtctttcacacagcaaaaatttttaattttggtgaagttcaatgccttactccattttgtgctgttatagatactacagactgcctgggcatggtggctcacgcctctaatcccagcactttgggaggccaaggcaggcagatcacttgaggtcaggagtttaagaccggcctggccaacatggtgaaaccccgtctctactaaaaatacaaaaattagccaggcacagtggtgggtgcctgtaattccagctactcgggaggctgaggcaggagaattgcttgaacctgtgaggcagaggttgcagtgagctgagatggcaccactgcactctagcctgggcaacagagcaagactctgtctcaaaataataataataaaagttaacatttgaggaaggtgtgagatttaggttgaggtgcccccccccactttttaaaatacggatgtcaatcattgcaaccatgtgttgcaaagattgttctccttcattaaattacgtctttgtcaaaactgatggaattgacgtctttgtcaaaaatcagttgggcttatttgtgtttggtctatttctgtgttctctagtctctctcattgactgctggcctctacccatttgccaataccacattgtcttgatgactgccacttcaccataagtcttcaagcagagtagtgtgattgtaagtcctgttgctttattatccttctttatcaaaattgtttggtttttccaattcttttgcccttccgtagacattttagaatcatctatctatatctacaacctttccttcttcttcttttttttttttttttgggacagtgtcttgctgtatcgcccaggctggagtgcagtggtatgatctcggctcactgcaagcttcaccccctgggttcacgccattctcctgcctcagcctcccaagtagctgggactacaggcacctgccaccacgcccagctaattttttgtatttttagtagagacggggtttcaccgtgttagccaagatggtctcgatctcctgacctcatgatccgcccatctcggcctccaaaagtgctgggattacaggcgtgagccacccgtccagccaacctttccttctttttaacttatttttacgaggcataggcttatgatgaccccattttactctttgttctaagtaggattttgacactcagagttctaggtagaacctttgggtaggttccaaggaagggagaaatgctgcttttatagaaaactcaaaaaaaaaaaaacagccattcacctgcttcttgggagaacagattgccttttgcctaaggaacatgaagtgtgcagatttgctttcttttctcactgtggagctggtctgtgcattttgttctccactagtttgcaaggccaagttatattcactttttttgacagcaaaatggtaagaacacttctgactcgtcttggaagatattatttatccttctgaaacatgtttttcatcaggtcaaataacttgcctgaaactgctcatacaatttcttctaaaagtggagcaagagttcatcttgtcttgttctgggattgtcagatctgaacacattgccctccaattctctggtttctagaacagacgaggctgccactcaacaccaaaactaagagaaggattgaagtgagtgggaatcactaaaagagtcctactggccttcttcctgggactggggagccagctgtcctttgcccctccactcccagctccccggtcctggacctgggaagactcccctgctccggccctccctgcatccctgagaggcctggagagcagaggcctctagagctggtcgctgtcttgtttactacctgaaaccaggcctctgagttttctgcttgtgcaacaagacgatctgcttgaggaagagaagtcatgggccactcattaagacagccagtcccaggggaaagagaaatgggtgaggcctgggatgtaggagctccttctggctctgtcgctggcttactgctatacctgggacaaagaatgacttccttaagcccgttgtgctcacctataaactggcaactatgcgatctgacctgctcatctcatggaattgttgcaagactcaaatgatcaagcaagttttctaggaaacatctggaaagaggcagcccaaactgttcagaatggcttctctagggaagaggatatgggagcgaatggagagaactgcggttattccgcttttgtcttcgattaattctgatcttgtttccaaatgttttaacaaatacggattccttttgtgattgaaaaagtttgtaggccaggcatggtggctctcacacttgtaatcccagcactttgggaggccgaggcaggaggattgtttgagcctaggagtttgagaccagcctgggcaatgtagcaggaccccatctctaatttgaataataaaaaataggccagcacggtggctaatacctgtaattccaacactttgggaggctgaggtgagaggatcccttgagctcagtagtctgagaccggcctgggcaacagagtggaaccccatgtctgtaagtaattttaaaaattagctgggcagtcgggcgtggtggctcagcgtgtaatcccagcactttgggaggccgaggcgggcagatcatgaggtcaggagatcgagaccatcctggctaacacggtggaacccccgtctctactaaaaatacaaaaaaattagctgggcgtggtggcgggtgcctgtagtcccagctactcaggaggctgaggcaggagaatggcatgaacccgggaggcagagcttgcagtgagccgagatcgcgccactgcactccagcctgggcgacagagcgagactccgtctcgaaaaaaaaaaaaaaattagctgggcatggtggtgcacacctatagtcccagctacttgggaagctgaagtgggaggattgcctgagttcaggaggtcaagactgcagtgagccttcattgtaccactgccctccagcctgggcaacagagcaagatcttgtctccaaaaaaaaaaaaaaaaaagtttgtaaatgttcacatgtatgttaatgtaataatgtgttttgtggtcttcaaaagtctccagccctgctaagctgccagttacccttcttagcctgtgttgtgggttgcttagctcagagtcgcttgcttcggtttcacagcatgatgggctgagcccatggatatctgaaacctgagggtgttgatgaaatcagctaggatgtggacctgggttgaggtcccctccatggcttcctgttgactgtgagtctggctcctgcctccttcctctgagcctcccaggcatggagcatgtgtttctccctggctatctggccagcccagcctgcaggcaggcactgtggtgccagagagagcgctgctgctgaacagaatagagtcagcacaaaacacattaaaaaatcaatcgctgggacagcagcccaccagagaaagggacctgggcgcagaggccatcctcccaaggagctggtgcagctgggggctcagggcatgccaatggctcagcaggtgcagtggccagcctggccagaagtactccaggcacaaagacacagccagaggctggcacaacttcaccgggcagcaaggagcaatggggtcgtgtgcctctatacgtgtttagttgctgtttggaagccgcttgcaggtggaatgcgtgttctgatctccccatgtggctgagatccgtccagggcaggccttcgcttccccagagcccctcccacatctgagaaaatagctgggggtgccgcccgtggagaacccaggataccccagtagcaagaaaaggcacccaagaaagagaccaccgctgttcctaatggggcagtcctgactgtcactctgaccaatgacaggagggcagaacccctaggacctctctctgtggagtggggagagagggcagggacggcagggagcccagcctctctagccagccccaccaaccaggtcgcattcacagatgagctcattaggggctcactcaggaattcacctcctgcccccaggctctgcagacatttatggtgggggtaggattcctgtgtgctgaaaacaaattctgtcctgtcctcctaccactacctggacctgcgggggagggggcacaagttgtcctgcgctagcggctgtcccgagcctcaggggggctacagctgctcagtgagcagggtggcccctgagaaggagtgaggaggacccagtcctgagtcagcaccactcagacccccaccctgctcccctcctgaacaagttcagcacatggggttgggacacagacacaaataccccatccaacgaactctctctgattggaaacacaaatctctcccctcttccatcaggatcccagacagaaaccatctcatgcagagagcatcctgaggccccacctcctccccagttcagggctcagcaaactttttctgtaaagagccaaatagcaaacattttcaactacattcgtgaccatgtggtccctatcactattcaactctgccagtacagcacgaaagcagacagacaataaggcaacaaatgggcatggccacgttccaataaaactttatttatacaaacagatggcaggctggatttggtttgtggactgtagtttgctgacccagctgtaattcaccaggcacgtcctagggcaggtctgagcaccctttaggatcagccgtcctcccaaggagctgggaccacagatgtgtgctaccatcccggctcatttgtttattcttttatttttatttatttaattttttgagacagggtctttctttgttgcccagctagggtgccatgacatgatccctgctcactgcagcctcaacttcccaggctcaagcaattctcctgcctcagcctcctgagtagttgggactacaggcacatgccaccaaacctggctaatttttgtattttttgtagagatggggttttaccatgttgcccaggctggtttaaaactcctgagctcaagcaatctgcctgtctcaatctctgaaagggccaggattacaggcatgaccaatcatgctctgcctgagtttgctctttttatccccattttacaggtgaggaaactgaggctcagagaagcaacaacctgcccaagggcacataaatttagctgtagtcaaaaggaaaacacagggccaggcgccgtggctcacgcctgtaatcccagcactttaggaggctgaggcgggcagatcacttgaggtcaggagttcgagaacagcctggccaacatgctgaaaccccatctctaccaaaaatacaaaaattagccgggcgtagtggtgcacacctgtagtcccagctattcaggagggtgaggcaggagaattgcttgaatccgggaggcggaggtggcagtgagctgagatcgcaccactgcactccagcctggacgacagagtgagactgtatctcaaaagagaaagaaaaaaaaaaaaggaaaatatgaaagccaatatacaagaagaaaaggacaggagtgggtgaggcgccttgggaggctccacagacaaaaggcaggtaagaagctgtattgggataactatggcttcatgttttccagaggaagagggggcagtgcctctgagccaccacgggctcagctgggggcctgggggcctgtctcttgcacacctgccgggctttcctgggaagctgacggcccttggtggaaaggttccttgggggtttgtgggatgagcatcccagtggctgcataaggggttgggtagcgtcgctcactatttaatagtctacctggaatctcagaatgtgaccaatttggaattagggtctttacagatagaattaaggtaagggccaggtgcagtgcctcacacctataatcctagcactttgggaggcctaggtgggcagatagctcgagcccaggagtttgagaccagcctgagcaccatggcaaaaccttgtctctacaaaaaatacaaaaattaggcaagtgtggtggtacacacctgagtcccagctactcaggaggctgaggcaggagcatcgcttgaccccagaaggtggaggctgcagtgagctgtgatgactgtgtcactgcactccagtctgggcaacagagtgagaccctgcctccaaaaaaaaaaaaaaaaaaaaaaaaaaaaaaaaaaaaggtaaggactgagataagatcatacaagattaggatgggcccaaaattcaatgagaatgtccctataggaaccaaaaaaggacatagtgagacttacaggagaaggccctgtgacaatggggcagagattggaatgccaaggattgctgggagtccccaaagctagagaaatggaacagattcttcctaggcacctccagaaggaacctaccctgcccacaccttgatcttggacatctggcctcagaactgtgagaggattgagaggataaatgtctctgtctctgaagtcacccagtttataggaatttctttcatcagtgacaggaaatgaatattttatgtgtgaactttggttttttgttttgttttgtttctttttgagacagacatttgctctatcacccaggctggagtgcagcctcctgaggagctgggattacaggtgtgggccaccacatctggctaatttttgtacttttagtggagacaggtttcgccatgttggccaggctggtctcaaactcctgacctcaggtgatcttcccgcctcggcctcccaaagtgctgggattacaggcatgagccaccatgcccagcatttatgtatgaactttggagggtggttcccaatgtccctggttcccagccactctgaggtccccagtgatgattgtagagtgagagaatggacagagaaagggacaaataaagagagaaacagctggcggggcagggaatagcttggaaagccggggagcagtgccagtttaagggaagccactgcagggggccaggaggggggcgaggccagaaaacacacagaagaggtgaggctggctgtgcatggcaccggctcctctaggcctgagaaatgcaaacaggcagagctgtggccagttctttatccaagagatagccagttcaatgaaaggcttatttggacggctttggcgcctgtgcctgcacagaggacagtcagaagccacccccatgaaaccacccaactgcctggtcagggctgtggtcaggatatgggagggaggccaggctggatggtggccagggacaggactctgtatcttggccctggtcttggtggcccagggctctaatccccattgcaccaggcaacccagcagcatctggagagctggggaggggctaaggttgctcagcggcttttcttttcaggggtctccgctgctccccacactctccagccaaagccaggacccctacattgtcacagtgacaaaccttctaacctgggcagctcaggaggcttaggagtgggactggccctcattctgggtggtagcgggcaccacttcctcccctccctgtcactgccccattgatgggtagagtccctttctccaccaccccattcaatctgggatgtcttgaccaagagaatatggtggtgtcagcatgtgactctgtgccagatgcgccgggaggcctggagaggactagcaatgtctacctgcttttgaagccaggagcttacatttgtgaagcctggggctgggtgcagtggtgcatgcctgtaatcctagcattttgggaggccaaggcaggaggatcatttgagtccaggagttggagaccagtctgggcaacagtgacacctcatctctacaaaaaataaacaaaattagctgggtgtggtggtaccgatttgtggtcccagctactcaggaagctcagacaggaggattgtttagacctggaaggaggctgcagtgagctgaaattatgctactacactccagcctgggcaacaaagcaagaccctttctcaagaaaaaaaaaaaaaagcagccccagccaggctgtactgctgagaggccacgtggaggagccctgagtcaccaccttggacacccagcctggttgagccttcagatgaccacagccccagctgctatctgcttgcaactacccagagatccctgaggaagaactggccagttgagccccatcaacccacgcaaccatgagagagaaaaataaattgttgtgttaagccactaagttttggggtagtgtgttcacacaactgttccctttcccatcctcattcactggctacttcggggccacaaggacccccaagctccagaatccatagtccctcattaatgatttgacctagtggtatccctggtgagaccagcctgggtggcagggtagagttgctgggtggcactctttctggggttgatagaaatatttacattaaaatccataaatatttgtaaaacggctggatgtttgcagcactctgaggagtaaaacagcacacaataccttttatttgaagagcagtaatgagtgtttcaagcactctaatatatttcatcacatttcacccatgacaaccatgaaaggcagccgggcaggcatcctcccttttatgattgagcaggaaactacattaagaccacacaaatagaaatggcagagccagggctggaagccaggttgtctggctaccggtccgcaggcctcctttccctgcatccctattgtctgcaaaccatctggagagcagttttctttttttctttttatttattatttatttatttttcttttcttttcttttcttttcttttttttttttttttgagacggaatctcgctctgtcacccaggctggagtgcagtggcacaatctcagctcactgcaatctctacctccagggttcaagcagttctcctgcctcagcctcctgaatagctgggattacaggcaggtgtgccaccacacccgtctaattattttgtaattttagtagagacagggattcactatgttggccaagctggtcacaaactcctgacctcaggtaatccatccacctcagcctcccaaagtgctgggattacaggagtgagccaccacacccagcctatttatttattttgagacaaagtctcactctgttgcctaagctggagtgcagtggcacgatctcggctcactgcaagctccgcctcccagattcaagtgattctcctgcctcagcctcctgagtagctgggattacaggtgtgcagagctaattttttatatttttagtagagatgaggtttcaccatgttagccaggctggtctcgaactcttagcctcaagcgatcagcccacctcagccacccaaagttctgggtttacagccatgagccaccacacctgaccttattttatattttagagaatggggtctggctatattgctcaggcaggccttgaactcctgggctcaagttgtcctcctgcctctgcctccctaagagctgggattacaggggtgagccaccacgcccagctggagagcagttttcgactcggacaagccccctttcccgggctggaggaaggacaggcagtagccatgagccctggagtcaacttcctggatccagctgtggctctgcccttagttaggataacctggcagctagttactgaagctgtaaagggagatgccatttatccagctgtaaacggagattcactgctggagagagctctactgctgagacctggtgaaccggctcctctaggcctgagaaatgcaaacaggcagaggacaggctttgggggctgcctcaactgacagagcacagcggaagtgaccctctgtgatgctgaaagccagatcaaagaatgtgtggtgtctgccttgctctccaggaagcagtcggacttccctaaggctgccacacactgaggaagccctaactagccacagggagaggccctgaggccacataaaggaaggaggacacacagatgcctgcctgtcccctgctacctcagccccatgctgtcccagcagcgtgcactgcctgactgcacctgtctgaaagacccagagctctaacctggtctctacaaaaaacaaacaaaattagctgggcgtggtggtgcatgcctgtagtcccactactcaggaggctgagacaggaggatcatttaggcctgggagaaggctgcagggagctaagatcatgcccagccaggccctgcctggactcctagcccaaagaaagcatgggaggtaataagatggttgttgaagccactatgtctggatgttatttgttccacagcaacgtcacataacggggacagggtggctggggtagagtgggttgaaatgtgtcccacctgctcccctaaaagaaaaaagagggagagagagagatgttcacctggaacctcggaaagtgaccttggttggaataagtgtcttcacagatgtaattaaaatgtggatcttgagatcagatctttctagtttaggggaggtcctaaattcagtgaccaatgttcttatgagacagaaaaggagaagacatagggagccatagagatgtgggaggcacgatgagtccatgggagcacagaggcagagactggagtgatgaggccacaagccaagaaacacctggagcccccagaagctggaggaggcaaggaagcatcctcctcttgagtcttcagagggaaagtagcctggctgacaccttaatttcagacttctggtccccagaatggtgagaatgaaatttctgttgttttaagccactacgttcatgacaatttgagttttttgggtttttttgttttttggtttttggtttttttttttttttttttttttttttggacaggatctcgctttgttgccccggctggggcgctatggcatgatctcggttcactacaacctctgcctcctaggttcaagcaattctcctgcctcagcctcccaagtagctgggattacaagtgcccaccaccacacccagctaatttttgtatttttagtagagacggggtttcaccatgttggccaggctggtctcaaactcttgacctcaggtgatccacctgcctcagcctccagaagttctgggattacaggcgtgagccaccacgcctcgctagttcatggtaatttgctgtggcagcccgggggaattagcacagggggctagaggttcccacgctgctgtcatcacagtgactgtattttacaactcctaagtcagatgcggaactgcaaaacaggatgctcctcagggaaataagaggacagcagctttgtaatcaggtgtcctgggataatggaagatgcctactggccacagctagagtgaggcccagagggccagaaggcttagggcaagaaataccggagaggctcgccatcaggatgcagtctgtctctcacagctccttacagaaaagctcaaatgaaacaaaaataagcaaaagtatgattgacccatgggggtcctcagtctcttcatcctagagtttagatcatctctctccaatacccacagtgcatctttttggcagagtgaaggtagccaaaaacccttcccccaaagatcttgtgtggatttgggattaaatccccacctggatagagttgggtgttttgttttgttttgttttagagatggaggtctccctttgctgaccaggctggcgtgcagtggcacgatgatagctcactgaaaccttgaattcctgagctcaagctatcctcctgcctaagcctcctgagtagctgggactgcaggtgtgcaccaccgcacctggctaatttttaaatttttttgtagagacaggatcttgccatcttgcccgggccattcgcaaactcatgggctcaagcgatcctcccacctctcccaaagtgttgggattacaggggtgagtgagccaccgcacccggcactgtggagttggtttaaccaaaatacaattctcaccataaatacatttttgacttaaagatatttccacctgtatggtggcattgcacccggcctcgacttagaatttttcaactttacaatgatgtgaaagcaatgtgcattcagtagaaatcgtacttcaagaacccataccaccgttctgtttttcactctcagtacagtactcagtaaattacatgagctattcaacacttaattataaaataggctttgtgttagatgagcccaactataggctgaagttaagtgtttggagcatgtttaaaggacgctaggctaagctatgatgattggtaggttaggtttaacaaatgcatttttttttgagagacagggtcactcaggctggagtgcggtggcacaatcatagcccactgtaaccttgaactcctgggctcaagcgatcccccgcctcagccttcagggtagctgggactacgagtgcgctccaccacacccagctaatttatttttaagtttgtatagagttggggtgtcatttttttttttgagctggagtctcactctctcacccaggctgcggcacaattgtgcgatctcagctcactgcaacctctgcctcctgggttcaagcagttctcctgcctcagcctcccgagtacttgggattacaggagcacaccaccacatctggctaacatttttctatttttggtagagagaggatttcatcatgttgaccaggctggtctcgaactcctggcctcaagtgatctgcccgcctcggcctcccaaagtgctgggattacaggcatgagccaccgtgcccggctaggtgtctctatcttgctcaggctggtctcaaaatcctgacctcaggtgatcctcctgccttggcctcccaaagtgctgggctataggcgtgagccaccataaatacatttttgacttaaagatattttcaacttatgatggctttattgggctgtaaccgctatgtgagtagaggagcatctgttcttcccctgaaactacaatcctgtatgtatcttaatgactggttgacatttctgtctccgtgattagatgagtgtctagggggcagaggtggtgactcagtttcccttgtaacttttgcctggcttgctggaagtattcattaagtatctgtagaaatgggcctgacacatcgggaagctacagtatgaagggccaaagggacttacctgagctcacctcgctcactggaggcagagctgggactagcaaccaattcccaatgcagtcttttcctggcatgcacgtccaagtgcctggtttggcggaggagtcagtgagcacccggaatgaggggctgggtggtgtttcttggaggggtgccaggactctgcctagaaacagagctttcagagaaatggtggcttctgaaacatagaggaagacacggggcatagagatgtttgggatagtcaggtgggaaagttctggagccaaatcggccttaggaggataaaacatccaaggaagaaatcaatggagacaaattctgtcggcagaatccagaatccactgaaagccatgaggaccctccagtgagagagggcatccacagcttggaaaaatggcctaggtatcaagggctttcgaagtgacttaaggagctgggtgtggtggctggtatgtgcctatggtcccagctactcaggaggctgaagcgggaggatcacctgagcccaggagttcaagtctgcagtgagctatgatcatgccattgcactccagcctgtgtgacaaagtgacaccctgtctcaaaaaaataaaaataaaggccgggcctgtaaacccaacactttgggaggccaaggcgggtgggtcatttgaagtcaggagtttgagaccagcccagccaacatggtgaaacctcgtttctactaaaaatacaaaaattagccaggtgtggtggcaggcgactgtaatcccatctactcaggaggctgaggcacgagaatcgcttgaactcaggaggcagaggttgcggtgggccaaggtcgcaccgctgcactccagccttggtgacagagtgagactctatctcaaaaaaataaaataaaataaaataaaataaaataaaaacaaataaataaatacacaaagtgacttaaaagaattgcccgcctatgctgctatctgctgatgatgtcattgacaaggcaggtcagtctaatcatcactctttcctcagcttccatgatcatgatttctcccagcacctcagtaatgaaggtgacactgactcatatgtacacagggcttttcacatcatgaagcctgggttgtcgtttaaattgtgcccctcaccgcccctgcccaaagatatctgaagttctaacctcctgaaactgtgaatggggaagttctaatcccctgaaactgtgaatgttaccttgtttggaaatagggtctttgcagataaaatcaagtgacaatgaggtcatagttgattagggtggacctaatcctataggactggaagtgaggagacacagaacatagggaggccatgtaacaacagaagcaagcaagcacggaggctcacgcctgtaatcccagcacttcgggaggctgaggcaagaggatcgctttagcccaggagttcgagagcagcctggacaacatggcaaaatctcatctctatgaaaaatacataaagcagctgggtgtggtggtatgtgcctatggtactagccactcggaaggctgaggcaggaggatcacttgaggcaggagcctgaggctgcagtgagctatgattacaccactgcactccagcctgagcaacagggcaagactctgtttccaaaaaaacaacaacagcaggccgggcacggtggctcacgcctataatcccagcactttgggaggctgaggcgggcagatcatgaggtcaggagatgaagaccatcctggctaacacggtgaaaccccgtctctactaaaaatacaaaaaattagctgggcatggtggcgagcgcctgtagtcccagctcctcgggaggctgaggcaggagaatggcgtgaacccgggaggcggagcttgcagtgagctgagatggcgccactgcactccagcctgggcgacagagtgagactccatctcaaaaaaacaaaacaaaacaaaacaaaaaaaacaacagcaacaacaacaaaaaagagactggggtgatgctactgcaagccaagaagtgccaacaattgcctgcggccaccacaagctggaagggacaaggaaggattcttcccgagagacttcagagggaacatggctttgctgacactttgattactggggtgagccaccatgcccggccaatagttgacttctgtgtttcctttttatttatttttttgaggcggagtcttgctctgtcgcccaggctggagtgcggtggtacaaacatggctcactgcagccttgacctcctaggttcaggtgactctcccaagtagctggaaccacaggcacatcatgcctggctaattttcctatttttagcagaggcagggtctcaccatgttgcccaggctagtcttgagctcctgagctgctgacaggtgtgagccaccgcacctagcaagttgacatcttgactacaacttcatgacaccttcatccagaaccctcacttaagccactccctcattcttgatccacagaaattgcatgttatcctacatgtttattgctttacaccactacactttgtggtagatagctaatacctttatcctatcccatcagagacagcatgcatagtggttaaaagtcaactattggccaggcgcggtggctcacgcctgtaatcagaggccaaggcaggtggatcacctgaggtcaggagttgacctgagaccagcctggctaacatggtgaaaccccatctctactaaaaatacaaaaaattagccaggtgtggtggcacgcgcctgtagtcccagctcctcgggaggctgaggcaggagaactgcttgaacccgggaggaggaggttgcagtgagctgagatcgccccattgcactacagcttgggcaacaagagcaaaactctgtctcaaaaaaaaaacaaagtcaactattggctggatacagtggctcatgtctgtaatctcagcactttgggagactgagaggcaggaggatcgctgaaggccaggagttcaagaccagcctgggcaacatggcaagaacctatctctataaaaaaaattaaaaataaaaaatttagccaggcatggcgtgcctgtggttccagctactcaggaggatctcctgagcccaggaggtcgaggctgcagtgagccatgtttgcaccactgagctccagcctgggtgacagagcaaaaccctgtctcaaatattggctgggcatggcagacaccagtaatcccagcactttgggttgctgaggcaggaggatcactggaagccaggagttcaagagcaggctgggcaatacagtgaaatcccatttctacaaaagaaaaatcaacatcacttactagctattgaccttgagtaagttgcttcagccttctctgagtctcctcttgtgaaaggataactgtatctgtcttataaaagtgccggaaggctgggtatggcagcttatccctgtaattccggcactttgggaggccgaggtgggtggatcgcttgaggcagggagttggagatcagcttggccaacatggcgaaaccctgtctctaataaaaatacaaaaattagccaggcctggtggctcacacctgtagtccagctacttgggaggctaaggcaagagaatcacttgaacccaggagacagaggttgagtgagccgctgcactccagcctgggcaacacagtgagactctatctcaaaaaaacaacaacaaaaagactgctgggaggaccaaaggagttaatatttaacttctaatggtccctgtggcatagtaaatgtgagtcattataatttgcatgggtgactaagaagctcaaaagaggcgaaaagacaactccagggcaacacagcccgtgactcattggtcaggctgagtcctgaacctgggtctcctggctccctgcacagtgctcatggttcaactgaaacctggaactagaatggccagtgaaatccgatgctctgtgtgactgtaacttctgttattccctcctgtgtggcaggctgtttcagcagccgtgcactgtctcccatccaagtactaatcaggcccaaccctgcttagcttcctagatgagacgagatcgggtgcgttcagggtggtatggctgtagacgcagccatgcactgtcaacagctggctatgcacctgtgctggggtggggagggcagccagttgggtcagactgtggctctgtgcctgaccctgagaagagagagcccttggtccctgcaggaggggtgttaggaaggtgcgctagggcaggcagacagcagactgcatagcgtctgagaggggcttttctggatcacatttcattgccagagcagctccaaggacagggaaggcaccgagctgctgcttgtagccctggttaggaaatggccaggagagcaggacaactgttttgaaaggcaatatgacattagggcaaaagggctgctgggaataaatccctgctgcacaggctgctttagtttaagccgaccaaaatgacctaggacaggccaggcgtgggtgctcatgcctgtaatcccagcactttgggaggccgatgtgggtggatcacctgaggtcaggagttcgagaccagcctggctagcatggcgaaaccccatctctactaaaaatatcaaaattagctgcccgtggtggcgggcacctggaattctagctacttgggaggctgaggcaggagaatcacttgaacctgggaggcggaggttgtagtgaactgagatcccaccactgcactccagcctgggcgacagagcgagacttcatctcaaaaaccaaaaaccccaaaatgacttatgacaagcggaggcccgggagccacagttcccctggaaggtctactcccttctttcttctaagtctgtggcttctgccccacatctgagaacaaaaagcagtgaatggccagagtgatgcaaagaaaaaagagcagaaacaagacaagctagtggcctgtgcaattcacctttgaatgggcaatattctctatgaaaattggatgcaaagaacctccaggtgtgcttgtagctttctaaagactcctcatggctaggttttccttaacggaaaacatcaaggaaggttactgagtgtggtttctctgaaattgccatcaggacctaaaataccccataacgaggagctccgatcctttcggctgatttactttttctccggagccttaccattttctagaaagaggaagttaggagtgatggggcaagaccagacaacagcagataatcattccatgataattgcctttgatgtcccggaagagacaacgtgcaaagagtcagctcccaaaatatcttgataagatcttgcctttggggttggctcattttctctgtgctctctgcccctccctccctagggcttcgctttgtgtgcagctaaccaaggcttctcacagcaagcctccccaccaaggattccatactcaggccgggcgcggtggctcacgcctgtaatcccagcactttgggaggccgaggcgggcggatcacgaggtcaggagatcgagaccatcccggctaaaacggtgaaaccccgtctctactaaaaatacaaaaaattagccgggcgtagtggcgggcgcctgtagtcccagctactggggaggctgaggcaggagaatggcgtgaacccgggaggcggagcttgcagtgagccgagatcccgccactgcactccagcctgggcaacagagcgagactccgtctcaaaaaaaaaaaaaaaaaaaaaaaaggattccatgctctctgactctcactgcttctctccccatcaaacctcctttcccaggagttggtttaatcgtattgccatcctaccacacacaatccgatcacagctacggctcctcagcccccagactccactttaaccctcctgggaagcatttgcttgttttgaacatggatttgggccaggtgcggtggctcatgcctgtaatcccagcacttttgggaggccgaggtgggtggatcacctgaggtcgggagttcgagatcagcctgaccaacatggagaaaccccatgtctactaaaaatacaaaattagccgggcgtggtggcgcacgcccgtagtcccagctactcgggaggctgaggcaggagaatcgcttgaacccagggggcggaggttgcggtgagccgagatcacgctattgcactccagcctgggcaacaagagcaaaactccaactcaaaaaaaaaaaaaagaaagaaagaaagaaagaaaagaaaagaaaatggatttgtatttcattggctctcaaactttattagacgtaacagtcacctggagcactttgataaaataaaaattctgatagacaggtttgggtgagtgtcaagaacagtgcaaggttagagataaccaagcgcacgcgtgcttgtgtctttccacaatgtcaggcttttactgacgcatttcaatcacaaaagccatgagctacatggagttcccaaggaggcaattctccttagtacttcccgttcgcctgtacttagagccgcacatatgggtccatcaatactgcaaaccatacataataatacacttaagcaatatatacacgttatacattaaccattccacaacaaacaaagtagcatttaacatcgagaggagagagataggagaaagagttaacaaaccagtccagcaggagcaaagaagacaaaaggagtcctggtctgggccctgctcttcagtcctgcaaggaagagtctttgatgtggtagaggcttcgaaggcagagactgggttgttatcaggaggcagtgcaaggctgtgctaggaccactagaagaaggcctgctctttttttttccctgaaactgaggtttcactcttgttgcccaggctggagtgcaatggcacaatctcggctcactgcaacctccgcctcctgagttcaagcgattctcctgccttagcctcctgaggagccgggattacaggcatgcgccaccacacccagctagtttttgtattcttagtagagatggagtttctccatgttggtcagactggtctcgaactcctgacctcaggtgacccacccgcctcagcctcccaaactgctgggattacaagcgtgagccaccgcgcctggccgaaggcctgctcttttaatggttacagaatcctttggtgagaactgatcgtgagagtgtgcttctttgtccatccttatctggttggatgcagtctttgtttgttgatttattaagcaaaacttttctgggggtcaagggacagggtctcactctgttgcccaggctggagagcagtggtgcgatcttggttcattgtaacctctgcctactgggctaaagcgatcctcctgcatcagcctcctgagtagctgggactacaggtgcacgccaccacacccagctaatttttgtattttggtagagacggggttttgccatgttgcccaggctggtctcaaactcctgggctcaagcaatccatcctccaaggcctctcaaattgctggaagtacaggcatgagacacggcacctggccaagcaaaacatcttattctcgttgggaaagtactctatgaaatataaaatgaaatgtttttctaaggtggagttacttatattaagggtgttttatacagtgggtaatagtctttttaaaattcattcatttttcgtttttttgagacaaggtctcactttgtgacccaggctggagtgcagtggcaggatttcggctcattgcaaccttgacctcccgggctcaggcgatcctcctctctcggtctcccaagtggctggaaacacaggcatgcaccattatatccagcttatttttgtatttttttaagaaacggggtcttgctatgtcactgagtctgttctcaaactcctcggctcaagcaatcctcctgccttggcctcccaaagtgctgggattataggcatgagccaccacactgggccaggttatggtcttaataaagcttacaggagattgcgaagaaggtgaatctagaactcccaggaaccatgttttcatagggatgacttcagacaggcatgggaagtattttgggaagggggaaagagggcacaagaaaggaggcgatgcctaatcctttaattatcttttcaatagtggtaaggcaaaaaacagggaagaatagagaaaaagaaatgtaaggctctcgttttcttttcttttctttctttctttcttttttttttttttttttgagatggagtcccactcactcacccaggctggagtgtagtggcatgatcttggctcactgccacctctgcctgctggattcaagcgattctcctgcctcagcctcctgagtagctgggattacagttgcctgccactacgcccagctaatttttgtatttttagtagagatggggtttcaccatgttcaccaggctggtcttgaactcctggcctcaagcaatccacctgcctcagcctcccaaagttctggtattacaaacgtgagccaccacgcctggccaaggctcgaattttcttttttttgagatggagtttcgctccgttgcccaggctgcagtgcaatggtgcgacctcagcgtaccacaacctccacctcccaggttcaagcaattctcctgcctcagcctcctgagtagctgggattacaggcatgtgccaccatacccgcctaatttgtatttttagcagagatggggtttctccatgttggtcaggctggtctctaactcctgacctcaggtgattcaccctccttggcctcccaaagtgctgggattacaggcgtgagccaccacacccggccaaggctctaattttctagaaggtttcattgtggacccctctgtgccacctcaccttggccctaccctacgctgatccctgtttctccaagaagcagccaacctgaatccttcatggggcatccacactgtttgtattgtggctgtttctcctttcattcctcatagttaacatccacaattcttaaacttgcctccctggttcccaaggccagtgtgcatcactgcattagtccgttttcatgctgctgataaagacatatccgagactgggcaatttacaaaagaaagaagtttaatggacttagagttccacacggctggggagacctcacaatcatggtggaaggcaaggaggagcaagtcacaccttacatggatgggagcaggcaaagagagagagcttgtgcagggaaactctgacttataaagccatcagatctcatgagacttactcactatcatgagaacagcacaggaaaaacctgcccctatgattcaattacctccctccagttccctccagcaacacctgggaattcaagatgagatttgggtagggacacagccaaaccatatcaatcactaaccacatttgggtgatgtggatgtgaaacaggcttggaggctcgtcggctagagattccgattcaacagttcagaaaggggcccaggaatccgctttctaaacaaacaatgtaactggttctgaagctgtgcactgatgctggaggaagtcgaggggccggcttcatcaccgtttttgccagctgctttccccacgacagaattgcggaacagaggatgatgagcctggagctagcagcacccaatcactaaggtccgctaccagaggctctgggatctgtggtttcatttaagctccacagcaagccccagaggcaggggtcattgccccgcctttgttgttgttgttgttgttgttgttgttgttttgagacagagtcttgctctgttgcccagactggagtgcaatggcacaatctctgctcactgcaacctccgactcccaggttcaagccattcttctacctcagcctccggagtagctaggattacaggcacccaccaccaggcccagctaattttttgtatttttagtagtgacagggtttcaccatgttggtcaggctggtcttgaactcctgacctcaagcaatccacccgcctcagcctcccaaggtactgggattacaggcgtgagccactgtgccctgcccattgccccattttatagataggcaagttctgtgctctttgggctcctctactgcccctctagctctaaaactgtgattccatgtggggaagtcaaaacccaggcttaagcccgggcacagtggctcacacctgtaatcccagcactttgggaggcagaggcgggtggatcacctgaggtcaggagttcgagactagcctggccaatatggtgaaaccccatctctactaaaaatacaaaaattagctgggcgtgatggcgggcacctgtaattccagctactcgggaggctgaggcaggagaatcgcttgagcccaggaggcggaggctgcagtgagctgagatggcaccactgcactccagcctgggcaacaaagcaagactccgtctcaaaacaaacaaacaaacaagcaaacaaacaaaaacccaggcttaagctttatgcccgtcaccacgtgaccttggtaggctcctctcaccctggcctccagcttccccgtaaggataacgaagtcagccccatcgtctggggggtgcagcttctcagaggccaaccctggggcgctttgctttgttggaagttgagtttgattacagctctaatcatttgtcccccaaagtcaactttcttttattgcttacactgcagaatcatccagtctcaattaaaaaaagagatcccacatagtccagtggttaaaaaaaaaaccaaatttttttaataggaaaatagaccctcagaggaaattggtcactgggtttaactgggagggattgtctcgtgcctgtgaatgggttaatgtatcagggtgggcatgaggacaaattataaaaccaaaggaaaatgccgaaaggccatgtgagtgacagcaagaatgaaggctattgcatccgaggcctgaagtatagacccaggtcccactttagcataaccacggctgctattaagaccctcaaacgcaccatcagtggttctgaattttgcataatgattgaactctgccgtatcatcagaggggaggagaacggcgtggaaaccaaagggctgaaatctcagcccctgccaagccttctggggctccatcacactcccagaatagcgcggctaggttcccggcagcctcgggctgcgccgcagctgggcttccggagagcgagacgagtcaagcctcaagcactgccggggacagctgggactggacaccacccagaagccagctggctggccctgccctgccctgctggaggcaccatctctggtgagtgggggcatgtctgactcccctgcggctctcccaccattacctggggccccagctgagtcaggggtggcctcaaatcccaggcaagagggtggcatcagtgagtgggtctcctgaagtctttggtggcagtggctggagaaggtgttaaagggctgaatggccctgcaggtaggggaggctgcagtgtgtgccaggcggatgtgactttaggaggccagtggccaccagcagaatagggatgggaaatgaagatgggcgggcagggagacacagccctgccacaggccaggcaattgccccgtgcagtgcggtcttgaagctggcgtctgaaggtgaagggattgttggaagaagggagggtggccaagcccgtttccagcttgacaacagttatgtgttttccagtatcctccttcattcatttattcccttacaagtattaattgaggcagggccccaggggaaacacaaagatgggtcaggcacacatcttcccttcccaagagcttataccttggctggggacataaagcatgacagaaataaccatcgataaggcagaaaatgtcagggctatataagagataagagaagtgtactggggagcacggtacagtgaggtgcaagtccagcaggctaaaggaagatagttctaatctacagctagccactgagtctctatgaacctcagtctttaaatatataagatggagacaataacatctgccttatggaggcttatagggttgtaagcatcaaatatatataaaaggtgcttgaaattgtacagcaatatacagaggtaagctattatgggtatcgtattatccaactagccagcatctctctgaacttctccgcctggaattctgggagccacagggagcccaggatctgagtactgggttcttgtcagcagcaaagcaaagtctagaccctgaggcctcctttccccttatagaaggctgacagcctctctcagctcttggccaatcaatccaattgatccacagatatgtagtgcccattttttggatgtataaagcactgtgctagggaccatgggcgtggagaggcatgaaatccagagtccattccctacagacctatcatgagccagggaggcaagatctctgtttataagatacacctggccgggcacggtggctcatgcctataatcccagcactttgggaggccaacatgggcggatcagcagaggtgaggagtttgagacgagcctggccaacatagtgaaaccctgtctctactaaaaatacaaaaaaaaaaaaactagctgggtgtggtggtgggcgcctgtaatcccagttacttgggaggctgaggcaggagaatcgcttgaacccaggaggcagaggttgcagtgagccaagattgcaccactgtgctccagcctgggcaacagagtaagaatccgtctcaaaaaaaaacgaaaaagatacatctaaggcagagccatgtaagagtagcaaatgcatgccagaggtgggatcccaggagagcagagggaggaagaggactacagggtggggggtaccagcaaaagcctctgggaggagccaagggctttaaagggggatggaatcaagaggtcgagaggaggagagaggcatcctggattgagaatacgggacatgtgagcgaactcacaggaaggcaagtgcgggggcgaggcagactcagagcaggcttctcaggctggagtgaccatttcctgtgggggaacaggaaggagaagaggctggagtcaaggctaggtacaggttgcagaggccttgaatgccaggcaagggagcctggactttcacataaaggcaccaggagccagtgaaggtgttaggaatgaaaggtgttggggtgaagtcagtgaaggtcctgccccggatgggggtttgcagggtgactggagaagactgccaccaggggccatcactctgggggctggtgtagccactgcagcaaggtagaaggaatgctccccccgaaatgctcacagattggggtgagacgcttcctgaaggtaggggaacaaattgcagtgagggctacacgtttccattttgattttgatagaggcaggctgactgagtggcctggatccctggacccttggccttgatgtctggttctcaggatttgcgcagtctgtggatggaggctgaccagatcagagcagctcaggggaccccgttctctccttccacagggagttggttagcggccactgagccctgggcagggagggggatgagggaggagcagattttgcagccatgggggagggttcagcatcaggtgacattccagtggactctgcccaaggcctgcttccgggtacacttccagagcgatcacccatgggcagccagttgtggtgaatgagggtttcactcgcctgctccctggccctggcttcctccttcttaaggggccacgatgggacccgagtcctttcaaaaaactaggcagttcccgctgctccaagcagaaagtcctatgagcctaagagaaaaagagatttggccagacactgcagccagggcaggaaccagttaatatgagcctgggagcaaggagaggtgaaatgctgtttaccagcagccggctgtgggttgcagggcacccagccacctagcacaggattccaggccccaacttgtcaggaagcaggagccccaccctcagctcagtgagggactattcctccccatctggggcctggctgcaagacctagggctctccactccccaggtagagggagcaggccttctactctgtggaggaggaaatggctcctgttggagattctgcagggtgagactgcaatccagaactcctgctgcccaggcaaactgggaagtccctctaaacaacacaactgacctctggctctccctgggtaggcctctccatgcccaaagccggggtgccagggcctcctgccctcatctctgatgcagggcattgcagccccatggcaggtgacttctccagtaggcactggggcttgcctgcttctcagaaagtggggtacgggaggcagggcaggggtggtgctgtttgcaaggctgctggtgtgagggggaagatcggccgtggccagccacagaataacggatattccacaagcatttactgaaaacatttacccacacccgtctgagtgccagatgccagggaaaacaagatgagtgagacatgtccctggctctctagaagggcacagtgtaattggagaaaaaacaatttagaaggctaattatgatacactaggataaatgataaataaatgaatgtgtaacaggctgtgggtaaatagggcaactcacaatgggtctttcgtgggaaggtgaggatcgcttcacagaggaaggaacattggagctgagctttggggcagggcagattttttaaaactttttggtcacaaagaaaaaggatggtaagaggcataaaatgttcgaggtggaaggaacatcacacagagcatggcatggcaaagctattccaatcatggtgaaacagaactgaaagaatgccagcttctgcaagagtttgggttaaaaaccattaggccaagcacggtggctcatgcctgtaatcccagcactttgggaggacaaggagggaggattgcttgagcctaggagttccagaccagcctgggcaacatagtgagaccccatctctacaaaaaaatgcaaaaattagccatgcatgatgatgcactcctatagtcccagctactcgagaggctgaggcaggagggttgcttgagcctgggaagttgaggctgcactgagccgagatcgcagcaccgcactccagctggggtgacagagtgagatcctgtttcaaaaataattgattaatttaaatttaaattataaataaaaactgtcagacctgtcaaggcttagagggaatgacaatcatgccaggaaaggggaggctgatcgctggctccctgtaagcaccaggcttgtgtgaggaacattccagacacagcttcattctgggggtgatgttatcatccagttttacagttgaggaaagcagggctcagagagatgaagcaactcatccaagtcacacagccggcaggtggcacaggtgttcccacctttgggccttgtcaagacctcagacatctctgaaggaggctttccaacgaacaaagggtttctcactctgccagtaggaatccaactcaggtgggggtggaggtagttgggtggtggacacagacatgcttctccgcaatccagaatctttttttttcctttttatttcatatattaaaaaaaataaaataaataggctgagcgcagtggttcatacctggaatcccagcactttgggaggccgaggcggaaagatcgctggagctcaagagttcaagaccagccagagcaacacagtgagaccccatatctattttctttttcgtttgtttcaatagagatgaagtctatgttgcccaggctggtctccaactcctgggctcatgcgatcctcccacctaggactcccaaaatgctgggattataggcgtgagtcactgtgctgggcctcaagatctctttgaacagtagcactctttgaacacttctcagagtgtagttttttggtgaaaacagagtttgcaatgggttctacgcctactggggtattaaatcaaagtgaaggacatttgggggcacagaggaccctgtggctggagtctcggaaagcagcgccacctcccacagaacttcccttccagcatcacaggctcgctgggtccagcagcccccaccagggtctgactcatggtggaggggtctcatgccttctccaactcttgcctccccactctggaccagcacaggcccccgggactagagcagagaccaacagggaccctgaaggctgaagcccatgtcatcggccccaaaggacttgctttgtcctttaaaggcaaatcctgcccaggaagtgagacggagtgaacacaaaaagagcaaacagctctcaggaaacctccctacatatccgccgccatctaccatgcagggctggcagtgggcagggctccgctgctccgtccaggcctcagatgccccagcctttcccccgcctgggtcgggagggagtggtaaagagttgcctttttggagaatctaggtagggaaaagagattcccaaagcttgaaaataaattgaaacagatctgccagatccacaattcatctttggcttcttaaggtcacaagcagtctcggggactatttccattccaccttcctctagctcttagctggcttttcacatatgctaatgagcggcccctcccagcacactgtgttcagcaccagttgcctgcttcacgagaactagtcccagcccacagtcacggatgcccctcgcctaggtctgacccgccgtttgcctttctagcgttggcactcaactgcttggaccctacaagcgtttgcctccctggcatgggggcctctgaatcttagggtgggaggtggagctacggaagggagcccaggagtgagcaacagatcagcagcagcactgcgcccctcttcttaatattgaagagacttgaaacaattcagtcttcgccaccccagaccagcccgtgagggcaaggccaggaagggatacagggttctagagaaccagggcctcaccgccagctccggccgctaagcaaacattccctccaggagtccgagaagccggtgtgcgaggggaggaaccagcctgaggtttatcgctccagcaactccgggtgattcatagagtttagactcccggttgtcgtagaccgcggcaggcacgcaaacaagcagcccgggagataccctcccctttcccagcccccgctcctccaccttgctaccccctagcccgtgaccagctgcctcccctccccctcgcgggcgctcagggttgagcaaacactccgggccgcccgccccgccaccagctggctccgaccggcgcaccgctggcgatcccccaggcaattcggcgtcatgagaaccggcaccccgagactcggcgccctgccctccctccgcgtctccagggccctggccaggcccaacaacctctccctcctctgtgcgcctcagcccctacgggcctctggcgcgggctaactaggcctcgctgcgggcccccaggactgcgcaccccaccccccgcgaggccagcagccccgggggaaggcggccggaaaatctcttgtttatcgggctggataagtaccagcctggattcgcttcccaatttctgcggtccagcttcagcagattcctggggccggaggggaaagggtggcaacccacagatccaccccggaacagggagtggggggtggggctggtgggaacctgacctcctggaaaggacggactcggagtcagagccaacgtgtcccggagcgcagaggcccagggggtcgcgctaaacactgtacctcggggaacaaaaccgtgaaggctaattaggacaagtcggagcagggaacggggacgccgggaggggagagcgcgctccgagttgggcagaacctggaacggtcacaggaaacccgggcgcggggtagtcgggccgagggggacctttgcccacggtccagagtggtctggactcggcccacgcgtgagaggagcgcttggtgacgatcccacgtacgcttggtgactggtggaggtcccagagaaggaccgtgcgtgcaaaaggcgaacctcggtgtgcggtgtgtccacgtgtgcaagctggggaggggagggggcgcagaaggcgtgacaaagacggactctgtcttgagtgtgcgcctcgctccggcccgctcccagcgaactgtgcctgaagtgtgtctcacgggagggccaggacgaaggtgacaaaggctaggtgtcccccacggagacgcgccaaggtagccccgcgcgtgtccgtaggcgcgctctctggaagacgcggtggggggtgcgcagggctgcaccctcacaccaattgccccggcgaaggccgagcccagaaagtgagtgcgcgtgagtgtgcgcgcgcccgcatgcgggggcgtggcagtcaacagcaacaacccacacgccggcagggccagaaactcccatctccctcaccagccggaaagtacgagtcggctcagcctggaggtgagtcggggcggggagggccgggcaggctttgttcctgtgtaaacggagcgcacgtacctggagcgcggcgggcgcccgattagcgccctgaatggaggtgatgtaacggtgatgcaggctccagcccaccctcgccgaaagcaaggagccctgcctggggacaggcccgcgcgagagcgagcaacccagcgcgcctggctcagcctcggtcccagggagaggcaggccctgcgtcccggcccgggccccgccatcccagccaggaccgggcctggcccagcgccccgcgccgcgtccctcccacccccgcccgccccccgcctggggctggagttggccccaaacgctgcgctggagcggggccggcggcgagtcccaggtaagggctgctgccttcccgctccgccgcccggaagagtcgggtcgggacggcggggagtgggcgagggcagaggcggggggactggacatcctgcgggctggggacgccgcgccaactccgctcggtcgctgaaagttttcaaacccgagccggctggggactgggggggtgggggagcccggcgctgcggctcgggctggagggaggggaaaccactccataatcggggtctccaagaggagcccctccaccgcctgcctctcggtgggagtccgcggtcactctctctcgtgggtggcgtcctctctgccgcctgctactgtggatgtggagggcaggtttctgtggccctaaaaatgggagagagtgactggttcccttgctccccattccagccacccagggagcgcaggtgtagaccccagtaccgtcgacccaagtagggacgagagggttcagaatccccctgagggaagtttggaaattcagactatcaaagcgcctccccttctggtagcctggcccctagatcccgaacccccactcccggctggcttttccagcgtcctttgcacctccatccccaggcccgcagtgttacacgctggaagacccaatcacttacaaactccacgatcaagatcctaaagcccgggagaggagactgttggaagtagggttttgtgctcctggagcttcctctccccgccggccccccacccctgtgccttcaactggactgggggagggagtgcattggggggtggggcgcattccagagtgacattccagagcagacccttgaagatttccaagtctcagagagctcagggcattttggcccaaatgcctggtcttggtgcggggcaggggcagggggataggggtggggtgtctaggctgaggttcgaggaaccccaacccaccccccaccaacctacacactgaggccgctccttccaggcacaggcgtctcctgtgcgccttcttatcgatggggtaaacgcctgagcgccctgcacagaggggtgagacagtgggacctaaccagggactgggagagaccgataggagtggaggcaggaaggctgtcagtcgggccatcgtctttccctataggctcttgagtgtgtgggatgggaggaaggcaagtgctctgtggtatccctgggggaacctccctgaagagtgccctggtcacagcacccttgaagacagccattggccatgggtcagtgttgagtttggttggccctgtgacgcgctggagctctctttccagtgcggtatccttggccctggtgggtggagggggtctcaggcttgtgtgtggatgatgctggagcgaggaagggagttttgctctggagaagtgagaaggcctggctgtctccccggttgctggatgaagccacttgttgctgggggaaaccagtcagggctgcttgggcctctgggcctctgagcctctgagcccaccaggcctctgcgccccctggagagagaaggagggaggagggaggttcagcaactggactgcactgactcacaggagagctgggggcagggtggctgagcctggggaaaggccgatttcggaggcgattaaaaatatttgtacaactgattccagggaagtgaagcaaaaggcccttttgtccagaaaataatctgaggctggagctgggcttcagctgtggggtgggggagactcagggcggaaggaggttcccctcctacccccctccttgaaccctctgagaatctttaagcagaagatgcaactccaacatggaggggacaaccctgggtgtggagaaatgcacctgggaccatccagaggtgacttccaaatgcccactgtgttcaggcacagcaccagctgtggcagtggattctagaagtcttgttcaccagcttcaaagaccttacagccctggaggggagacacggacatgatttgaacgttcagggatcagaaggctcagtcttagtgcagggtctggggacccacaggaggcagaagtttcctccagggtcctgaggaaaagcctctgaccagagctgagtccatcttgtcagtcccttagccaccatcttaaaaggtggcattgggccgggaacggtggctcacacttgtaatcccagcactttgagaggctgaggtaggtggatcaccttaggtcaggagtttgagaccagcctggccaacatagtgaaaccctgtctctactaaaaatacaaaaattagttgggcatggtggtgggcacctgtaatcccagctactcgggaggctgaggcaggagaattgcttgaacctgggagttggaggttgcagtgagccgagatcatgccattgcactccagtctgggcaacaagagtgaagcttcgtctcaagaaaaaaaaaaaggctgggcgcagtggctcacgcctgtaatcccagcactttgggaggccgaagcgggcggatcacgaggtcaggagattgagaccatcctagctaacacggtgaaaccccgtctctactaaaaatagaaaaaattagccgggcgtggtggcgggcgcctgtagtcccagctactcgggaggctgaggcaggagaatggcatgaacctgggaggcggagcttgcagtgagccgagatcacgccactgcgctccagcctgggcgacagagcgagactccgtctcaaaaaaagaaaaaaaaaaggcattggctgaatgtgcactcccggcatcagagggctggagctgtgctcttctgagcttctctttaactctctgagggtccctgtcctaggcagtggatgagagccacgcccagaaagcccaggtttcccacctgagtccatgtatttctgtcttcccacctgcccttccatttctgggggaaccagagaaataagatatttcaggatgggaccaggttgtttcctctgaggctgttaagttactcagcaacttactaaaagcagcagcctggctgctgggcagcagcatggtacctggatgcggtgaggggcaggtacaggctcctctctcattccttgaaagtttctatattgagggggttggcaggagaagcaagacttgaagggtcaggtgcagaaggaagttgctggtcaccaaccacaaaatcagggggaaactggaggtgggggcttagggacagagagctgtgaagctttcctgaccctagcccaagtgcctgtgggcttcttggagccagcagggtacaggcaagtatttctagggcaagatggatcaagaagaatgagtgacattggtccctggcttggttttctgtaatgacatgcctgttagatttgaacttgtagtatgggctttagtatccttttcccccacctccgccatccaaccagtccttcgattgttttttggaaaggatctttcagagctggccattatggctttacctttggccttgacctttaaactggaatgaatgtgccccccaacaaatcgattgcctgtgcatttttgccagactcttttcctaaaagcgcaaccctggctatgcccccatgatgctaaaagcagccttcagtggctgcctgttgcctttaggataatgcccccagccccacccctgtagcatttccaatgtgtcagccagcagctgcagcctccctttgcagactcagctgatacttggcaaactgaattcttttttaacttgctctggacttgggctcaaagggctttgattcacaccatcttttctgccttgcacgtccctctccttgttcccttcacctgctcagtccttcctcacattcttcagggcttagcttttgggtgtccctgtctcttggcagtgtctgggacctggtatgtttttttattagattctgagtaaaactctgcggaacagtctttctctactctgcctgtttctcttctgtgttcctgtagcccctgtctctctcctgcaggtaaattccgttgtgtggcccttaatcatattcttccttgtgtaatttttgtgagtacctaccttatctctcttgatagattttaaatgccatcaagtcagggactacgtttgttcatgtttgtattttccacagctctgggaacaacagggcctttccttcccaggcgcacagtcaatatttgctgatttggagtaattgcctgttctaaactgggccctggccgagggaggtggggtgaaaagcccttgaaagtgcaggtgtccggagtctaagtggcagttctgagggttctcttccctacgtccagcttcaagcccaagttctggctggtttggctgtggagcccaagatgaagttgaacatttaggatcccacagcttgttgttatccataaattatctcccaggagtgggtccatattacgccttcccttttttgttgttgttgttgttgtcgttgttgtttttggtttttgagatggagtctcgctccgtcacccaggctggagtgcagtggcgcaatctcggctcactgcaatcttctgcctcccaggttcaagggattcttctgcctcagcctcctgagtagctgggattacaggcgcacgccaccacacctggctaatttttgtatttttagtagagacgtggtttcagcatgttggtcaggctggtctggaactcctgacctcgtgatctgcccgccaaaagtgctgggattacagcatgagccaccgcacccagcctactccttacctcttagccctctcttactcctctttccagcacttgtaaataaaatgcagttggtgctttattgatttacaaagtcccctacagaagcttatttaagtcctgcattagaagtaaagagaaactagccattagaacgccagttatttaggaaaacaacagtacatttacatgagatagttaattttaagagttaatcttaagcaagcttaattgaaagatgaggtagctgagatggctaagacgacctaaatattttcaagtggcatggagactatttgaagggactttgaaaatggatcctctttattgtgtccatttcacttaattttatgagttgcattgcccctgatttagtaagtgttctttcacataacaattatggacagaatttttttttttttttgcttctgtgttgaaaagagggacaatttctatcaactgtgggatttagggcttttgtttgcctattagaaattaagtagccaggaatggtagaaaacagtaaggaggtaaaccatgtataaacaacctcacaatccccctaaaaaaggaaaaagggtggcagcctcacagaagagagttagataatgccattcccctgccagccactagtggtcactgtcagaccaggaaagcttggttgctgttttcccagagagttcctgatgaagctgggttacaactagttatttgaacacgtggggtgacttaaatgtggactacctgcattcatagaattttgaaacgtataacctgtttctttaagcatttaaattttctttttcttttcttttcttttctttcttttttttggaaacagtctcgctctgttgcccaggctgcagtgcagtggtgcaatcgcagctcactgcagcctcgatcccctgggctcagatgatcctctaacctcagcctcccaagtagctcagactacaggtgcatgccaccacactctctgctaattcatatatatatatatatatatatatatatatatatatatatatatatttgttgttgttgttgttgtttgttttcatacagagtctcactctattgatcaggttggagtgcagtggcgcagtcttggctcactgcaacttccacctcccgggctcaagcaattctcctgcctcagcctcctgaatagctggtattataggcgtgcacctccacgcccggctaatttttgtatttttagtagagacggggtttcaccattttggccgggctggtctcgaactcctgacctcaagtgatccaccagtcttggcctcccaaagtgctgggattacaggcgtgagccactgcacccagctgctaatttttgtgttttttatagagacggggtttcaccatgttgcccaggctggtctcaaactcctggactctagcaatctgttcaccttgacctcccaaagtgctgggattataggcatgaaccaccgtgcccagcagcatttaaattttcagtgttaggtttcctccaagtacatttaaaacttttgattggaaaaaaactcattgatttggtctttaatatttcttaacctgttaaatccattacctccacttcacgtgggaaaatccaattggtattgggagcaggagtttggttttcttctctggcacagatctgtggcatttggtagagcggcagtcagtagatggagtgaaaattaccttgctggtgttaataaaagctaattttcttgccttctagctacaacgtcttaaagtcttctattaaagattaattcctttgggttttgcattgcccttgcctggttcttacttttaaaatgttaatgctccgaaggaaaatttttgcattaagtcattaactccttagctggggacttcgtttatttcacccttgacttccgcttccgagctaggcaaaaaatggaggattctgaactggagacttggcactaaaagtgggaaaatgactgtctcttcatttttcctggctgttggttatgcctgctgcagctgcttgttaagtctattgaatgaatgaatgaacacatagctgactggctgtggatttaggcctcacaggaatggagtttaggggcatagcagctgacctcctgaagcctgaaagtcccagggcagagaggaggtactgggtgggtggtatgcttggtcttgacttgttcacaagccccttcatcctccaccgtggccgccagagctcagggaatatctgaacccaggttatgtttggtggaagggagggaactgaaaattcaatgacaggtttttcttttgccatggctaggaatagggctgacaaatgggcttcatctcatttgcctctgtggccagttgaaatgcctctcaggggttctatgttaagaaggattctgaggtccagagagcctcacggtcagcagctagcactatctgcctgggtttaggttgggggaagcagcaccatgtatattggagtctgatcttggaggactaattttgtcccttttccttctgtctctagggacccaaccagagcctggcctgggagccaggatggccatccacaaagccttggtgatgtgcctgggactgcctctcttcctgttcccaggggcctgggcccagggccatgtcccacccggctgcagccaaggcctcaaccccctgtactacaacctgtgtgaccgctctggggcgtggggcatcgtcctggaggccgtggctggggcgggcattgtcaccacgtttgtgctcaccatcatcctggtggccagcctcccctttgtgcaggacaccaagaaacggagcctgctggggacccaggtattcttccttctggggaccctgggcctcttctgcctcgtgtttgcctgtgtggtgaagcccgacttctccacctgtgcctctcggcgcttcctctttggggttctgttcgccatctgcttctcttgtctggcggctcacgtctttgccctcaacttcctggcccggaagaaccacgggccccggggctgggtgatcttcactgtggctctgctgctgaccctggtagaggtcatcatcaatacagagtggctgatcatcaccctggttcggggcagtggcgagggcggccctcagggcaacagcagcgcaggctgggccgtggcctccccctgtgccatcgccaacatggactttgtcatggcactcatctacgtcatgctgctgctgctgggtgccttcctgggggcctggcccgccctgtgtggccgctacaagcgctggcgtaagcatggggtctttgtgctcctcaccacagccacctccgttgccatatgggtggtgtggatcgtcatgtatacttacggcaacaagcagcacaacagtcccacctgggatgaccccacgctggccatcgccctcgccgccaatgcctgggccttcgtcctcttctacgtcatccccgaggtctcccaggtgaccaagtccagcccagagcaaagctaccagggggacatgtaccccacccggggcgtgggctatgagaccatcctgaaagagcagaagggtcagagcatgttcgtggagaacaaggccttttccatggatgagccggttgcaggtgggtctctgtggatgcccccagtggcccctttctccatcccatgtcttttactgcaggacagggagccagtctcttgagcaaaatggaaagtttttgaggttttctgtagttttctgcctaagtgtctctaaattccatttaatttaaagatttttttttttcagttgggcatggtagatcatgcctgtaatcctagcactttgggaggccaaggcgggtggatcacttgagacgaggagttcgagaccagcctgatccacatggtgaaaccccgtctctactagaaatccaaaaaaattagctgggtgtgctggctcatgcctgtgatctcagctactcgggaggctgaggcgggagaatcacttgaacctgggaggcggaggttgcagtgagccaaaatcgagccactacactccagcctgggtgacagagcaagactccatctcaaaataaataaataaataagattttttttctatattcatataattcatgcatacattctcactgtaaaatttcaaacattacagataaaatgaaattttccccagctgcctccccagtcctacccgtcccatcctgttccatccccagaagtgaccactattgactgatataatatctatgtgcctttgtttctccatttgtaaaatggggataatgtcagtacctatttcatagggttcttgtgaggattgaattaattagtgccggctgggcgccatggctcacacctgtaatcccagcactttgggaggctgaggtgagtggagcttgagcctaggagtttgagaccggcctggacaacatagtgaggccccgtctctacaaataatttcaaaaattagccaggtgtggtagtgcatgcctatggtcccagctcctcaggaggctgaggcaggaggattgcctgagcccaggaggttgaggcttcagtgagccgtgattgcaccaccacattccagcctggatgatctcaaaaaaaaaaaaaattacttagtgcccggcccatgaaaagcactcttgaagaattagctatttgctgtgtgtgcgtgtctattattttacatattttactaatactatccttccagaacttgtttttctattatgtatgtatccataatcaccttagttttctttaaaaggaagtatttttcaggtaatttttttctctttttttattttttgagacggagtctcgctctgtcacccaggctggagtacagtggtgtgatcttggctcactgcaacctccgcctcccgggctcaagagattctcctgcctcagcctcccaagtagctgggattacaggcacgtgccaccacacctggctaatttttgtatttttaatagagacgggatttcactatgttggccaggctggtctcgaactgctaacctcaagtgatccgcctgcctcggcatcccaaagtgctgggattacaggtgtgagccactgcacctggcctttttctctttttaataaaagtatttggggtgccgtgtagtggtctcagcagcgcccttgttagctgtacagcccactagcatttcctcagcacctgctctgtgccagcccctgtgctaatccccttaccgatgtggcccattgcacgcatcccacctgctcttcctcagcctgctggctgcagcccctcatctgacatgacctggaaatttgggggtgccatctcaaagtcctgaccctgcccccagactgtgctgatctggaggcctgggggcttcagactttcttaactgcccggttaacaagcaccggctctggggtctctgctgggaggtcagagtcaggcagtggaagttccagaatcagagacattcctttctcttctacacactgtgaaatcctcataatccctgctttggagaaagagatgacccttgtcctgccgggcacttgatctttgatctgcccacctgggctgaggtgctggcctcacccctgggtggcccctgtcacacgcacggtgtgcatggcgggggtggaattggcaaaacccaccagagaggtggggcttacagacaagtgctgggaggagcctcaggccccgcccccacactgaatgccggtcggggccaaatggttctcaaccttggggctgagtttttacttcctttttttttttctaaatggaaaaatcaatagagtgagcccagccccagcacttaggaaactctatataggttgcggtccctcagaactgcagggccgtcagccttgccggagccagacgtccgctgtgccgtcctcacagcaaggcctgctccgaggccccggggtgcgtcagcagccctcctcaaacaccctgggagtgcccagcagggcggaacacaccgggaaaccaacaccccaaaggcacaaggaagtatccctggagctaaaaatagttctggaaacttgccagggggccacaggctgggacgtgcgttaaggctccctggccaggctctgggttggtgtagtggggaaggggcgcccaggtcggccctgggaggacatgaacaggcttaggccgagggctctcagatgtatttacctctgtgcctggcagctggcccgtggtgacaggcagagctggaggctggccatcttggaaggcggccgaaggcccatgtgtcctcttggcctctggccccggagggcggatggggatgtggaagttgctgacagagcattttctgagctgttgggtcaggggctggggtgtctacagtgcagggaagctcagcagtgttgttcactcccatgcatctgtacaaaggggtgctaggcttgggagggggcccccgtgttcacaacctcacccccaagttggccactcctgggttagagactatgccagggttggcctgccccctttacctcttccctgcccccagagagccttgcttggtttgtgggaggtggggaagggagctgagagccctgggatcttcaaactgttcctgcttttccttgtagctaagaggccggtgtcaccatacagcgggtacaatgggcagctgctgaccagtgtgtaccagcccactgagatggccctgatgcacaaagttccggtaagtgggttccccaggtccccgtgacacgtctgggctacagagaccagcctcagcaggccagtgggagaaggccatgtggccagagctgggttgggtggaggtggtaaggggaaggcaagcttctccatctggtgcttttacctggggaatccagagccccagttcttaaattccttgtcctggagtcagtgtacccaccaccttcagctgcactgcagtgggacccgccctgtgtcactggggcattgcacacaggttgtgtcgggatgctatagggaatgctgggtgagctctccctggtgggagctgccagctttaccctggagggcttggggagggacaaaggagggtctcagccaggtgctcccaaaatagacaggggtccaaatgtcacaggtctggataggtgtttacttctcaaccacagctgtgccaagggggcccacactctcctccctctctggcaggcagcaagtctcgaccttacacctccccctgggttctggaaactagaagcatcgttagccaggggagggggagggagcaggaagacggtgggttggattctactcactcctatatgtgttcctcctcccggctggcagaggctgtggggagaggtcagtgacccgtcttggcaggacactgggaacaggaaacaaggaggtcagctgggtggcgttctcatccccctccccgccctctctgtgagagccgcggggcagggggaggtgagtgtggctgaagcttccaatcccagcgcctcccctctccctgagcctgaacctgagcctgggcagaggagagcttccggagcaccaggagtggaggctgcgggctgtcagctctggcggggagtgggcagccacagaagcctttgctgaatagcttccttcactgttgctgcacctcactccccagcgcgtttggagtctgcttcctgggggatgatctggattaacagggatattttatctgaccggttctcaaaacatggtacccggaccaccagcactagcctcacctgggagcctgctcaaagtgcaaatgggggccaggcacaatggctcacacctgtaatcccagtactttgagaggctgaggcaggtggatcacctgaggtcaggagtttgagaccagcctggccaacatgctgaaacctcatctctactaaaaacacaaaaatcagccaggcatagtggcacatgcctgtagtcccagctactaggaaggccttagccagaggatcccttgaacccgggaggtggaggttgcagtgagcacagactgtaccactgcactccagcctggacaacagagtgagactctgtctccaaaaataaataaataagaaaaaaaaaaaaaagtgcagatggggcggggccagagctgggatggagctgactgttagcatccgttcagggcgtcggcaccatgggggcactatccagcgcagatctgcaagcccagcattcagcactccctcccccagccccagctgttgccagctgcatggggccagctgtgttgggtggggactgtgtagggtccagctatgagttggtggagtctgcgtggggactgtgtagggtccagctatgagttggtgaggcttaacaagcagtgcaggtgattccaatgcacactcatctgtggttttggaccacagatgtagatgttccagggaccacatggacaggggccattgcagacaggcctgaggacctcctgggcctgattgacttgaaggctagtttggggtctgggagctacagagatttggtggcagctctttcccatagggctaagacagatggggccaggaatacacctttcctccagcataggagccggaacaggtacctcaggaccctcttcaccccacagctggtgtctctcacccacatgggagcaagacccagcgccaggcagagaattcaggtttcaagactccaaatcagggctggttgcagtggctcatgcctttaatcccagtgctctgggagactgacatgggagaactgcttgaggccgagggttcgagagcagccctggcaacgtagtgagaccccccccccccgcccaccatctctacaaaaaaaaaaaaaagactccaaatcagaccggccagactagatgcctagagagatgtgtgggcacacccagagccatgtcctccgccagggaagccagcaactgtgatgctgggggtatggtagtgacaggcggtcgactcggggtaatattcttggaggagccgggcatggtggctcacacctataatcccggcactttgggaagccgaggcgggtggatcacgaggtcaggagattgagaccatcctggctaacatgatgaaacaccgtctctaataaaaatacaaaaaattagccgggcacggtggcgggctcctgtagtcccagctactcgggaggctgaggcaggagaatggcgtgaacccgggaggcagagtttgcagttggccgagatcacgccactgcactccagcctgggcgacagagcgagactccgtctcaaaaaaaaaaaaaaagattcttggaggaagggggcctgggagctatgtcagacaggtagtagcagctctgtgtggctgactctccactggccctagcatttccctaaacaattggaagtaggagggtcttgagaaggggatccccctctgtgaagccccagcaccatccaaggtcagcaggggcctcgttcccatgcccagaggcagggtgagataaggggctcaggtctggctgtcccaggctgctcctggggcccagccagagggggcagaggagccgaggggggagttgggggggatctggcagtcccagccctgcaggaagtgtttgtgcatccgccccggcggaacctggctcccaatccccgactgtgagaccgcctgttcttccttccagtccgaaggagcttacgacatcatcctcccacgggccaccgccaacagccaggtgatgggcagtgccaactcgaccctgcgggctgaagacatgtactcggcccagagccaccaggcggccacaccgccgaaagacggcaagaactctcaggtctttagaaacccctacgtgtgggactgagtcagcggtggcgaggagaggcgggcggatttggggagggccctgaggacctggccccgggcaagggactctccaggctcctcctccccctggcaggcccagcaacatgtgccccagatctggaagggcctccctctctgccagtgtttgggtgggtgtcatgggtgtccccacccactcctcagtgtttgtggagtcgaggagccaaccccagcctcctgccaggatcacctcggcggtcacactccagccaaatagtgttctcggggtggtggctgggcagcgcctatgtttctctggagattcctgcaacctcaagagacttcccaggcgctcaggcctggatcttgctcctctgtgaggaacaagggtgcctaataaatacatttctgctttattaactcttgctctgggattgtggtttctgacctggcctcctggtttctgatgaacgtctcctccaccatggcctgtgggtgacttctctttcttccctccaaatccagctcacatttaaagctgctgcagatttttcctgtgcagttaagtagctgatgcctctccccagtgagtggttctttagcaggtcctctgtctgtattgtgtgcgatcagaatgaacacccaggctcagtgcgtgcctaggatgcagtcccgcacctgggcttgtctgaggccaggcagctttcctctgggaacccccctccagtggctgtggggataggactgggaaggtgagccttgagccaggtggctctgtgtgtaagggaagatgaactcatttcagcttctcctgggatgaatgacagtgaagatcccatagcggacaaagtggagactcattctgctccatgctttgagatcacaccgtgtgatacgtgcaaaggaatggcctagagagggtcaggaattgtttacaaatgggttgacaaaagtgcaaagggttgggccaggtcctggttggtttcgttcccgagcggtcattaaaatgtccatttatgcggggtgcgatggctcatgcctgtaattccagcactttgggaggccaaggtgggaggattgcttgagcccaggagttccagactagcctgggtaacatagtgagaccttgtttctacaaaaaaaaaatttttttttaattagccagacattagtcctagctactcaagggggtgaggtgggaggatctcttaagcccaggaggtcgaggctgcagtgagctttgattgcaccattacactactgcctgggcaacagagcgagactctgtctcaaaaaaagaaagtcagtttgttcggtacttatactaagcaaaagcctttcctcagcagctcattttttaatttaatttaatttaattttttttttgagacagagtcttggtctgttgcccaggctagggtgcagtggcacaatctcggctcactgcaacctccgcctcccaggttcaagcaattctcctgcctcagcctcttgagtagctgggattatagacatgtgccaccacacctggctaactttttgtatttttagtagagacagggtttcaccatgttgcccagactggtcttgaactcctggcctcaagtgatctgcccacctcagcctcctggagtactagggttacaggcatgatccaccactctcggcccatcagctcattttaatccccaaggctgccctggaaggtgggaaggactagtattctatcccttttccagattcaaaatcccagaactgtaccattttggggtgagacagggcctcagagtagttctaccgcccccttttacaggtaagcgaactgacccagagaggccaggccaacaccaaccaggttttcctaagactctgacgtccagcagcctctctccgtggcccaccctgggtaagccagtccagtgggtggcacttccagccatgtggttgagacagcagggtcctgacctttggacgctggctcaagactttgccagggggctgccaggccggccccggggagcctgctcctcccaggcttgggaatgtttctccccagctagtcagaagctattttctgataccggttgtaggggaaaaaatgtttttgttgaaagggagagaaaggttgctgggaaaaaaaaaataaacttgaaggggagagaaagtttgctgggaagaaaaaataaacttctcccaaaattctccttctatgctcagattgcattagcctcctggggactgaaacactatttttaagtaaaaaccagttcttgggccccacgcagtagagtcccctttgactcttgttctttctggtcactttaggctcagtccccacaaagtaaaacgagatggtagaagccctcttcccgggactgcacggcatcctgatcctcattcctctgtacccaggctggaccgggcccagcacctttcccatccttgtcattggagctgggaggggccggaggccaccaacctgaagcagtggaccgagtgggcccccgtgaagccctgagtgtgtgactggagcgcctagggccacctccctttcctgcccagcccatcttcctggtccccaggtggctgcagctacaaggagctgtccgcgggcccccaggctgcctccaactcccctcttgacacgcccccctccccccaaatcatagtccctgtgtccccaagctgtggttcagattgccttcttcccctctgtgaacaacaggcctcagtgccccgtcttgactctggaccttcctggccctgccatcttggtgtctggcactggcttgtcccaccctctgcctagatggatctcctccatgagtctttggagccaagccagggcagaagttggcccttgcccttctcaccagggcctcctgccaccacctggactgtggaaggccactgagatgggggcagagctcagcccgaggcttgggcacactgcttctctccacggcctgtgggtcctggatctgagcccttggggtgtttcactcaagagccactgagccgtccccatcttccacaaagcagtttccacaagcaagccagggccagccctgcctgcactctgcccgcagtgcccctcaacgtctgggatgaggatgagcctgctgagatgagggcagctctctccatccagcagtacctcatggagtgctcactaaggagttaggaatggcaggccacgctggcatctggggttcaaggtggctcctgtggcaggaacaggtgtccatgaccctgattacctggatctcacaggttctgggaatgcaataggggcctgctgtggctattccaacatctctggtcagggcctggaagtaccttaggacacatggggttggggtcaggactgcattctcagggaccagtggagagccctggaccagatgaactggagtctaggcctctctcgtgactgggacttgtgggacgtgggaggcctgtgagatccaggactaaagattatgctgtttcctaatgggcagatatgtaagtaggtaagtgggatcctcaggtaagcgggatccagaactaaagactgtgctatttcctgatgggcagatgtgttgtttctacctcatcttgggcagcacctggatatgctggcgctggttcatcactggaggagcctcttgtattttgagccctcggacatgctccagagggtcctgacggtcacccagcaaagagggggtacctccatggtgctggcaccaaagacagagatgggcacagctccaggctcgtgaaaatgagctctctataacattgtcttcctgaggtttttcctgcccttatccaaggtgggccctaaagctcagtccccagcccagcagcacctctgggtgccggggtggaggatgacgaccagagcagctctctggagaggtgccctgtagtcagtcccacagctctctggtgctacccccgtccccagcagcctgtgcctttgtcactggcatacttttccagagctaaattgggcgagcaatccctgcagagtaggattgcagctctgactgtggcccccgacctctctgtgttgcctgtcgaagtccatgaacagaatgttatttccctccagtggaagggaagcagggagctctgtggacctcacgctgcccttggtctagcttagcggccccaagatcccttagtgaatcaaggcgctgtgttgctttcctatgtgataatttcaaaggagtccccggcagggcctgatacccagaggctgcagtctccagtggacgtgggtgtgtgtatagcctgagtcctctgggggtctgcgcgtgaggctcagggagggatgggatcctaaaagatgcaggcctgcctgtattcaggagtacccactggccctgcttactcccgcccgggccaagtggagaagaagttagatgagttcttaggaggagagaggcagcttctttgaggtggtcgagtggcatcacaaacaagcgttgaatggaaaaagactagaagaggcagagcctgtcacaggttcaccatcatccagccaacactatgggaaatctcacacccaccactgtcaaaccgaggactttggacttaataactgctcagaattaaacgaccttaccttccatgggtgagggcttactgccattgaattcctgtgtgttcataaattctgggagttactagttttttttttttttttttaattatttttagagacagggtcttgctacgttgcccaggctggtctcgaactcctggcctcaagcgattctctcatctcagccttccatgtagctgggattccaggtgcctgctcccccacccccgaccctgcctctgggatttttttcatgtgtatttccctgctagacctcttgctttttacaccaacaaatgctgtttgattccaactaacctttttctctgttggggatttattttaaggggaaaaccaggcctccaaaaaccactgagctctcaacccgtcaaggccagagaactctaacacctacacaagatgtgggtggggagggaggcgaccccaaaagtatccctgttgctgcctggcatggctggaagaggcagccaggatacccattgggtgaaattctcagtgcacagaaccagggatggctggtaaatcccctgggccatgaagacctgcctgccgagtgcctttcctggctttccagtttactcatggccctgcacttgttcgtcagccccccacagctcatagaagagagcaagcaacagaggctaagtgcctgccctgtgggggtgctgcttggaagggtctgttggccctccaagccattctcgccaagggcagcattttcactagcccccggaggatgcgccaaggtcaggcacaggtgccaggaaccaggatttgtttcctgtctgccgtctccactctgggccctccaggaagctgcagcccctgttcacagcagctgcatgaattatttagcatctgcaccagaccgggagtgctctgacctcatcctccttgggctcagggtgcggttctgacctcatcctccttgaaaaaaggttgttgataggcagaggctggagcggtgcgtccctctggggtgcgggtgattaaaagggagacaccagtaccctcagagaaggaggtggggagcagcgacccatgcccttgtcgcaggaggcaattctgcagcacgcagaaaatatgactttggaatcagaggctgcgggttcacatcctggctgttagtagttctgtgaccttcagcagctcccttggtccttcctcagtcttctcatctgaaaaatgggggtaccagccccctgagtttgtgtttggtgttctgtcccctccagataacccccacgaaagtcacagtcaaggcagagcgtccaggcaccatctgcccagtgtttcctgcccagacaagcaggtcttctggccagatttcagtttggcacctcctggtgccacatcttcccttccctctatgctgcctcatgccctgggtccccagagtgggtggcttggcaggttgccacgattggaagaggatgctaaggagagagacccttggcagtgcccgcgccctgactggcaggggagaagggctagcagaggcgttaggagggtcgccaggtgcacaggaagcctaagaagctaggctgaagatctgggacggagctgctttctgccagcaaatgtccactgtctactgggtggacgggagggagtggagatgagagcgatctggtctctgccctcctttgccaggtcaggcctgagggctgaagtgggagtggccatgtgagtcccagcaaatgcgttttgggattaagcacgcaggtgccttcagcaagcttccccgggtatccccttcccaagcggcaccttcgtggcaggcagggcatctcggaccagggcctggctccagctagctctgtggccttggacagctcccttgacccctcgcccccgcaagggtttcctcatctgtaaaatacaccccgatgtctccagctctgtctaagccctggagttggtgtccccagcagtggagaggggacctaaagccccagggctctgccgcagatgcacccccaggggttccgactcaaagtctggagcagaactgggcagacacagggtgaccgcctggctgtgctttggagagagaagttgggtcccgtgggggtgaatggggccggtcccagaccggttgtccgccccatccgccgacccctcacctccgcagactcctccaagccaggggcctggaagtggctccttctgattcacctaaaggcaacggtggcttgcctcacccccaactccaccgacggcaggagagggtccgcgggggcccgggcccagggaaggttttacgctccgtccttaacccagcgtcctaacctgacccggctgggagagggggcggggccccggaaccccacccgcagacagcccactcccccgcacgcacctgggttgggggaggtggggggcggtggggggcagtgaaggtggggggaggtgggggtgggcccgagcagccggcgcgcccacgtgcctctcccgcgagggcccggccaccccagctccagccaacccgaggccgcctctcgtgccccaccccaagccccgccccggcccctgcaacccgatcctcgccgcggggcggcggccgaagccagctgtcccagctcctgctgtagcctgggggccgggccgccgcgctccgcccatccccgccctcagagctgggcctcgcagccgctagggattgcgggggccgcatttatccctgtgtctctcaggccccgcagagacgggggtggggtgggtgacgccagggaagcaggccccttttcccaagggaagaatccccttccggaggcccgccgggccatggagtttccgcgggtggaggtagtgaggccaagggcacggggagccctgtcgctgccttacgtctggctctaggccggggttcctcggctccaccagcgacatttgtggccggatcgctgtgtagtggagctggcccgggaactgcaggatattgagcggcatccctgaccccctccactggatgccaggagcacagccagccccctaaccctacaaccacaaatgtctctggacacggccaaacgtcccctgggggcaaactctccgggtggaaacccactccccgagggtttttcggtgggcatttgaggcagccacacgggctgggggcctggagctcgaggtccctgcagccaggaagctggtgctggcctccccttctccccggcgctgccagctgcttcaggctggcctgggaactgtgacccttggcctgacagtatttcggcagcatgtgacctgccaggctttctcaccgtagggtgcccccaccctgatgtgggtgctggcacaggggatgctggggacaagcccatcactagcagtcaggccagctggggcaccggaaagagactcaggcactgggtgtccatgggcagcctgaggttcccaagagaagctgggctgaggccgccgtgtgagcccaggggctgtccgggctgaaggtcagggggcatcctggcccacagggtccaccccttacgcgcacacacacacacacacacacacacacacgcacacactgggtggggcgtgggaaagacaaaaggagtcggtcccagctggggaggatcccgccctgtcccttcaccaggcccatttgggagcggtcatcagagccaggaaggtggtgagagggctggggcagggcactgttggccccaacccccactgcgtgccaccctgccatgcaaagcagaattttcagaagaatccaattgcagacttaacgggggaggttttagtagctccccctccccctgtgtattcacaattgactgtatttgcataggaaatctggaaagagacaaaaggcaccatagcagatgttaaagtggaccattgggggagttggccgggggcgtggggggaaagggggtcggatgtgggggtgggaatcccctggtaccaagcagatgagggacaagaagattttttctgtctcgttttgctttttctttctctccttcctttctctcttttccataaaaataaattacatatttttaaaaaaaaattcttctgaaagaaagaaaaggggccaaaggtagcagtggccccccaccagcagctgcagtggcctgcgacgtccctgccccagccttcacaaagaccagactgagctaccctcggccacactccctttcctcatctctccccctgagaaagatgggccaacttttagcctgcctagattttcaactcattctctccttgggagggttttcaaggaggctggggcggggagtgtgtgttcattgcatgtatgtggcatggggcacccaccctccacccagccttgctgaatgattcttcgaaggctgaattagatttacatccgtggagcagattggtgtgctgtttctcagcgtgtagctcatcattataaaacatgctgtgtcccatggggcagacagcaacagacatgggaatagcatttggctcattaattcattcattcatcaggttttcatccatatttatcaaaggctgctccgtgccatcattctaattaacatcaattcccacactgatctctctcctagtatccaagtctgtctggcacacaattctgtcacctcctccaatctgaggcttccatctccacaactcactgcagcccggtgtcctgggtctctgaggggaatctcttactgtgtgtgccagttcctcagctacttgacggtgtctgtagatagtgacctgctctgaggtctgcaagggcaaagtcacccccatccctgcatctgtgttcatgtccctgtgatggggatgatggttcactgatgggaactttggtcacctggggacagctgtgtcctggctttgaaagtgaggctggttggccatgcatcatggctcacacctgtaatcccagcacttggcaaggccaaggcgggggaattgattgaggccaggagtttgcgaccagcctggccaacatggtgaaaccctgtctctactgaaaatacaaaaattagccggggttggtggtgctcacctgtaatcccagctacttgggaggctgaggcaggagaatcgcttgaacccaggaggtggagtttgcagtgggcagagattgtgtcactgcactccaacctgggtgacacattgagactctgtctcaaaaaaaaaaaaaaaaaaaggaaagaaagtaggccagggagatggccggcctgggttgcggtgggggactctctcctttggtcatagtcagaaaggttaagagggtgctctcctgggcacccgtgaagtgccaggtgttctcataacccccgtgcactccagttcgtaaacttgtctgattctagaaatcatctgaatgcatttgttaaaatgacagattcccagtccccaactggagagacgccttattcagctggtccgaggcaggccccagaatctgcattctcagccagtacccaaggtgtttgttacatcagtcaaacttgggccccactactgtaggggaggctgagatgggttaatgctgcctccaccactgcctgggggagtcgggagaaggagctgggtgattgagtgaccaggaggcctttcaagtcatcaccttctcaccttttcagtggtggaggtgggagcttgtgtagggactgtggtgcagggttggggtaggagagagaagagtcaagagatctaaggctgtggtcccccagcttcccccatgactgaggacccatttgaggacaggctggacgtttttctgtatttttcaagggttctgttcactctccttcccgaattcctcaagggggagggtgagcaagtgggctgagaaggaggcacggggctggtgtccaggatccccgggccactgtctccggccgtttccctgcgtctgatagaaggggccccttcctacccaggcccctgggatttctgcctctcaccttttaaggcaatcctttgttttcccgtctttgtttacatgtttcccatgaaaccatgagctcctgaaaaggacatattgcggtatttttatcttcatgtccctatctttggacccagtgcctggctcaatgggggcagccattaatatttgttgaacaaattggcagtgcctgggcactgagcgccacctggcggcgttagcgggcatggtggtgcttagatatcagttggagcggcggacctagggggacgcgtcctggtcccctggtttggggcggcccgtccaagtgtgaggtcatgtaggggtggggtaggggtccctgaacaaggtctggtggggaggcgaggggtgggcctttgaaagctgtgactctctcaggataacaaggggcaggtgggaaaggaagccatggacgctcgggatggagaaagaagaggtctattcaaccatctattcattcattcatttattcactttcagaaccaactttatgggcaggattcagcaggaggctgggacttgtcatgctgagtcctccctgaagggactccctccttgtctgcagagagcttaggtagtccggggttggagaatatctatctccctgaagtggaatggccagccgacttctgcacttcctccaccccgtcctatgcacggtctggtgtctgaaacctcttttctcccactgcagtgccctcccaccctccctcttcctcagggcgtggaatctctgccagggctccactcatggactcaggcatggatgtttttattattcttctttagagacagggtctccatgtgttgcccggccagtctaggactcctgggctcaaaccatcatcctgcttctgcctcctgactggctgggattgcaggtgtgggccaccatgcctgcccccaaaggcccccgaagaattttcatgtgcacccaggcttgagacttctgccagaatctgtgtaagcaaatgtggtcagcgggaccgggaaactgcatcggagttatgtctctttctgcttcaccccacagagctctctccaggtcgctgctgtttttgctacaccctgagtccccaccccaacatatacactctgacctcctgcgatggttgatattgagtgtcaactggattggatggaaggatgcaaagtattgttcctgggtgtgtctatgagggtgttgccaaaggagattaacatttgggtcagtggactgggaaaggcagacccagcctcaatctgggagggcaccataaaagcaggtatgtaaagagcagactggctgagtcttccagcctccatctttctgctgtgctggatgtttcctgccctcaaacattgaactccaagttcttcagcttttggttcttggacctgcaccagtagtttgccaggggctgttgggcctttggccacagactgaaggctgcactgtcagcttccctgcttttgaggttttggaacttggactggcttcctggcgcctgtgcttgcagatggcctgttgtgggacctcaccttgtgatcgcgtgagtcaatactccttaataaactctcctttatatctacatctatgttagttctgtccctctagataaccctgactaatacacccccaaaactacccatgataaaagttgactctcctattctctagaagctagagatctgagcagtatttatttattttttattgtttgagatggagtcttgctctgtcacccaggctagagtgcagtggcacgatctaggctcactgcaacctctgcctcctgggttcaagcaattctcctgcctcagtctcccaagtagctgggattacaggtgcctgccaacatgcccggataattttttggtattttaaataaagacagggtttcaccatgttgtccaggctggtttcaaactcctgacctcaagtgatccacccgcctcagcctcccaaagtactaggattacaggtgtgagccaccgcgcccggccactcagcagtatttaaggttgcaaccttgggttcctgcacccatggccaaaacacatgttcacaaaggggtcactgccagctggtagccctggggcagtgtcccttgaacccagagccttaaggtaaagcatgtaaccttactcagggcaggggagggaggcttgaaacccaggttcctgtctttgtcctctcagtcctagaggcaaggcaggcgttccccaactccccacctgcaccctagcccctcccctctcctggaacagtccagcggaggcaggcagtggagtcacggtgctgcagcctgcttacgctaatgccgcagctggacagtcccaggtcagcctcagggctacaggccttcttgggcattgagagccccctgggtctcctcgactgccaaccaggagcccaagagaccacagaggccaagccgtggcacccttggtccctcctgggtggcctggtctgaaggctgggctctgtgccatttcctcctctgtgacatctttttaaacatttttataatttttttagagacagggtttctctctgtctcccaggctggagtgcaggggcacaatcatagctgtctgcagcctccacctcccgggctcaagcgatctcttgcctccgtctcccagagtgttggcattacaggcttgagccactgcgcccagccctcccctgtgacttctgcctctctctctcctttcatccactcttcctctcccttggagggcttcaccctctggagccttcagataatcttccaaaggggctggaggcttcccctgttcctggtctactggctgggggatctggaaggatccgcatacagatgcctctccacttctagacatgcagagataggaacagatttgcctgtccaagaaagcaggcagttctagcagccaacatcagatggcaacaggggctgcttgtgattagccagtttagactttgcctgggttccaaggagagcagcttctttagggggctgccgactgcaccccttgctggctgctgggtcccactgcctgatttgcatcccctggctccagccactttgggagttaggaacaggactgtgggacccccctcaagcacctccccacaacccgcctgctccagggctaagtttcaccatctggctcaccccagctccattctgtccagcttctgctcactcccctccctgccaccctaagtttttagggccacaatgtgtccacttggggccaaccagttatgggacagacaaccagggatgggtagggggtggggacagagccaaggtggagtgaggtttctttttttttttttttttttttgaaacggagtctcactctgtcgccccaggctggagtgcagtggtgcgatctcggctcactgcaacctctgccttctaggttcaagtgattctcctgccttagcctcctgagtagctgggactacaggcgtgcaccaccacgccaggctaattttttgtatttttagtagagacgggttttccctatgttggccaggctgctctcgaactcctgacctcaggtgatctgcccacctcggcctcccaaagtgctgagattacaggcgtgggcctccggcctggccctggagccagggttctgaagccaggtgagccatcaggagttggagcagagagaagatgctggggtttggggtgccctggagccagataggaatctattgggcacacctgggtccaggctaggccggtactggccagtagaccttgccttcagctgtgttgacatgcagcacctacacacagcactcaattcctcaaccccagagaggtaggaagccccattccttctgttgggagtttctactttggtacttggttagttgacaagcttccctgtttcctctcactttgcaagaaggagggagttagctctttgaaaaactaacaactaattagtgccaggaagggtctaagggggtctggcagcggaggtgacagaaaaaaaaaaaacaaggggaaaggctagcagaggtccccccctagggagttactgcacagtgggctggagtttggggttcaatatggtggacaaatgtgggttcttacaggcaagtgacctcatctctctgagctgtgaggcatatagattcacgtgtgtacatggtgggagttcaacaaacaccttcaaacagccctgaaggttgcacaggtgcattcacatctctgatctcattttaggcctcccagcagcctgaggagtacagggcaggctggagcgctgtgttcccatttcacggccaggaaactggctccaagcaaggacgcacctgcagctcagggctctgaccttccccgccgtgcggcaccattgtcatggtcgtggggcttccctgaggcaggcaccctttacccgcctcccaccccatcctgatccatgatgctatccctgataattacctgggattcatcggagacaccaaagggcagtgccagacagaggccgccctcttcccaccaccacctctatacatccctggagatgggcgtggggtgaggttgagaagtggcttgatgctgtactgatttttttatttttcctttcttttctttcttttttttttttttgagatggagtctcgctgttgttgcccaggctgcagtgctgtcgtgtgatctcggctcaccgcaacctccacctcccggttcaagcgattctcctgcctcagcctcccgagtagctgggattacaggcagctgccaccgtgcccagctaatttttgtatttttagtagagacgggggtttcaccatgttggccaggctggtctcgaactcctgacctcaggtgatctacccgcctcagcctcccaaagtgctgggattacaggcgtgagccaccacgcccagcctgattctttttccaggtatgcagaccactggcctctcgttgaatctgttttttgttgagttgtaactttgttgaaatgcacaaatcttaagcgcttctggtgccttgctgagctccacaggcccccggctattgagccaggtcccgtgccaggctcctctctccaaagcagagaagttatttccaggccaggcccctgtgattgggtttggggcctgcatggagcagtggcaccgtggacaggaaaccctgggggacgctgaggctcccaggcctctgactgtgaccaccacacatctgcctacagcttcctctttctcttcctcttgaccacggtacacccaggaccaagcaggagagcaggtaaccagtcatcgtgaccagctggtgtggactgtgtatggcccggggaccgtgggacatgctggggcatggggtgctgaagctgcctcagcctctggggggtgcaggaggagtggggaagcttccccagagatgggcaggaggccagggcatggtcagtccccaggcagcgtcaggctcttgcagctggtctcacccaggctcctggggaaaggaagcgagatcttcctagtcccaaacctctgtcctttcctaatgcccctccccctgcaaatctcattcagaccctgagtacacaactcaaagtacacacagcaagagtaccaagaggcagtaagttccccccagaggtcagcctacccccactctccatcctgtgctcagcagctgacaagctgttcatcccaatgagggggccacagtcacgccgccctgatcccgcctctcagctctgcgtgcccagcctctgggctgcccttgagtggcacccatggggccaaggccctccttgcttcaagctcagggggaggaaggaacagagtggatggggaacagcccaggctgccctggcgggagggtggctctagagattgggctgctttcaaaagggaagttctgctgagaaactacagcccatccactccccacatcttttctgaggactgggtggttcacaggactcaatgctgctgctgcaggtcttcccagaaagcacccctcattggcctctgagcacgtgtgtccacaccaggaagagactccagagctgatcagaagttttgtggctgctgtgggaccacttctcaccctcacccctgggaaatgggcctcagccctgtggcctcatctcctcctccccctgagtcatgtcacctgatggttatcgggacacagccggaatgtgcaacttccggcaaaaaactctcatgttttgtggttattttgcaccattttgtttcttcctttgggtttgtggacaggatggggtgagcaggatgggcgtggcagggtctaagtcccctgatcccttctcctttgcagtaagtcaggtgtttctctatgtgcctaaggagaattgcatcccatagattaaagtgtaaagcgcacttcctgtggaatccaattttcctattacctttcatcaaaagtagagatatattccctcagaaaaaactgacctgaggatgttaaggaacactgacatttcagtatttgtataatcataataatatttattcccacagaggagctgtcattattgacgttttacagaagccacaggctttgctcaagttcattcggtggtaagtggacaagccacgccagaacttagccttctgcttctctgtctggcctggacgttcaagattgcagcagcgcctttttggtcatggttgaatcaaaaaataatttttgagaaactttgcaatgatcaggccacataagccaccgaatatgacacatctcctgcatttttatgttcagctcaacagtgtcatgatccaaagtgtcttggatctttttttttttgagacggagtcttgctcttgtcacccaggctggggtgcaatggcacgatcttggctcaccgcaacctttgcctctcgagttcaagcgattctcctgcctcagcctcccgagtagctgggattgcaggtgcccgccacattttttttatttttagtagagacagggttttgccacgttggcccggctggtctcgaactcctgacctcgtgatccgcctgcctcggcctcccaaagtgctgggattacaggagtgagccaccgcgcccggcccgaagtgtcttggatcttaatgaggtttagttaatctatgactgcatcatcatgaaaatttccacaatgtccaccaggctttgtcattgaatcttccagcagcagagcccataggtctccttggcttcctgacaccttcgtgggcaaggcgcccctgtgttcagaaggaagaggaaagtgacaaattccaaaaagggccagagggaaggatattcttgggatcccatagctggcacagggctccatgtgggtggacactctgagcttggggactgcaagctcccaggtgacgcattacacattaggagtggcatttcctgtgcccacctggtcattctgtgcaagctggggcacctactcaaggcacgtgtgtgagactgtgtgtgtgtgagtgtatgtcactgtgtgtgaatgtgtcagtgtgtgagtttgtgtgtgaatgtgtgagtgtatttcagttgtatatgtaagtgcgttgtgtgaatttgagtgtttcaatgtgtgaatgtgtatgtgtgtttgtatcagtgtgtgtgaatttgtgtttgtgtgtgaatgtgagtttgtgaatgtgtgtgggtgagagtgcctgtgtgtttgtgtgtgtgtatatgtgtgtgtgcatgaacgtgtgtttgtgaatgtgtgcgtatgtgtgtgtttgtgaatgtgtgtgggtgtgtgaatgtgtttgtgtgagtgtatgtgtgtgggtgtgtgtgaatgtgtgtgtatgtgagtgtgtttgggtgagtgtgtgtgtatgtgagagtgtgagtgtgtttgtgtgtgtttgtgtgtgggtgtgtgaatgtttgtgtgtgtgtgtgtatgtgcatgaacgtgtttgtgaatgtgtgtatgtgtttgtgtgtacgtgtgtgtatgtgtttgtgaaagtgtttgtgaatgtgtgtgtgagtgtgtatatgtgagtgtatgtgcatgaacgtgtttgtttgtgaatgtgtttgtgtgtatgtgtgagtgtgaatgtgtgggtgtgtgtgaatatgtgtgcatgtgagtgtgtatgtgagtgtgtgtttgtgaatgtgtgtgggtgtgtgaatgtgtgtttgtgtgtatgcgagtgtgtttgtgaatgtgtgggtgtgtttgtgtgtttgtgaatgtgtgtggctgagtgtgtttgtgtgtgtttgtgaatgtgtgtgggtgagtgtttgtgtgagtgtgtatgtgagtgtgtttgtgaatgtgtgtgggtgagtgtgtttgtgtgagtgtgtatgtgagtgtgtgtttgtgaatgtgtgtgggtgagtgtgagtgtgtgtatgtgagtgtgtgtttgtgaatgtgtgtgggtgagtgtgtgtgggtgtgagtgtgtatgtgagtgtgagcgtgtgtgtgtttagagtctgcactctgtgtggatcaggaaaggggtccttgcaggctcgctgagtccctgctctgtgcccagccccgagttggctccaatggggctatatagaaaggaaggcatggccggaggacctctgtgtcaagttgaggacacatttccaagactaggaaccattcagggactctggagtcacgatgacaactccccttccctcagccccgaagcccaggcctggacctccaagggactcagggaagggactcaggaaaggggagttccccctggcagcctcctcgtgggcaccaccgagggtgagaggagccagctcagcgggtcccacccccagggttgcccaccttgaccacaaggaaaggagggaggagttattgggccttccactaggaggagacccggggaagtgagagtcggggatcagtcctgcaagctacggagtcactacagggagaggtctcatcactagaaatagccgaagaacctgcagcctcaaccagcgttaaggaggacgtgccgtttctagggagtcttagtcggggctcaccagcttcctgcattttctgaccggctccaggaatagaaccaaaagaagctgaacaaggaagcagcgcggcaccaagaaaagcagaagtcggggccttggaggcgtgactttcccctcgggtccaggtagggcctggagctgctgcaagtgccgcctgtgctggggaagggaccatgtggctgccttgggctctgttgcttctctgggtcccaggtgagagtttcccttcccgggaaagtctgcggcagggagggagggtgcgaggggcagggccgcagggcaggtatcacacgagacgccccgagtctggactccgtgcagaacgcagaatgcggtgcgctctgtctaccacataagatggacagatgaaggtccacacccctgggagaggaaggagccagggcctctcccggctctgcacccacgtaccttggctgaaccacagcggggcaagtgataaggggtgggtgcagaaaagggaccttttaggttttcagttgaattcttacaggaagggggacgagaggcaggatgtgtcagggtgggtggagagtggcagccactgactgcgaggggcatgtggtgagggtgggggagatgccgggctcactgggtgcagggtatggaggaggggggtgtggggagggtgggggagatgccggcctcactaggtgcagggtacggaggagggggtggggcggtgagggagatagggtcggggtggggagcagatcgatagtctctggaatgcggagatttaaccagggcagcccagcggctggggcctgagcagggggaagtcccgaggcagccttggctggggttagcccctgcatgggcctgagaaccaggggtcagtcctctccaagaaggggatatgggacagaggggacagaaaaggtggtggggagggcgaggagggaaaagatcgggcagagaagcgctgagatcttctttagggagaagcgtggagttgagtcttccctgtccaagcgcagggattcctcccgcagagtcacctgctgtgccttcagtcacgtccaccgctctcctcagacagctcctgtgcagactcctcaggcctagtcctagggtattgtacgtctttgtggttgctttccttacagatcggaggttttctgcaattatatttgctaactacttgtctgtgggaaggttattacttttggtgtcttgacttggaaacgggtcatcctcccataacaggtgctcctgcgattctcttgggtgttcttctgtttcatagggtcggtgtgcatgggaaggtttcagttcctgtctaatatctgtttctctttctcccattgactcattggctggtacagccggagtgaggcccagcggacatagtggtagtggttgtccctgccttgttgctgactcagggaaaaaggaccagagcttctcattattaggaagaagggatccaccaatgactattcacaaagcatttttacttttatttatttatttatttatttatttatttatttattttttgagatggagttttgctcttgttgcccaggctggagtgcagtggcgcgatcttggctcactgcaacctacgcctcccaggttcaagtgattctcctgcctcagcctcccgagtagctgagattacaggcatgtaccaccatgcctggttaattttgtatttttagtagagatgggctttctccatgttggtcaggctggtctcaaactcccaacctcaggtgatccactcaccttggcctcccaaagtgctgggattgcaggcgtgagccaccaagcctggccaacatttttatttttttgagacagggtctccctccgtcacccaaactggagtgcggtggtgcaatcacggttcactgtagcctccacctcccgggctcaagtgatcctcccacctcaacctccccagtagctgagactacaggtgtgtgccaccacacccagctggattcttaattttttttagggacagggtcttaccatgttgcccaggctggcctccacctcctgggatcaagggatcctcccatcttgtcctcccaaaatgcagggattacaggcatgaaccaccacacctggcccctacaaaacattttttattttatttttatttatttttttggagacagaatctcactctatcacccagggctggagtgcagtggcttgatctcagctcactgcaacctccgcctcccgggttcaagtgattctcctgcctcagcctcttgaataactgggcttacaggcacccaccaccactgctggctaatttttttgtattttagtagagacggggtttcaccatgttgcccaaggtggtctcgaactcctgagctcaggcaatctgccagccttggcctccggcccccacaaaataccatttttattatttatagaaattattattattattatcctttcagctatgaaggaggtgaactacattaggagatctggtcagatgtttgtcttgatttattatgctggcttcatggaaagaattagggagatctccctgtttccgtgttctctgcaaatgtttacataaaattgaaattatttgttccttgaagtttttagagaactagcttgtaaaactgtctgagttttgcttctttttttttgatggaagggaaagaatttcttaataacactcatcatttttggtctacattaaaaaaaatctagctgggtgcagtggctcacacctgtaatcccagaattttaggaggttgaggtgggaggatagcttaagcccaggagtccgagactggcctgggcagtatagcaagcaagaccccgtctcttaaaaaaaaaaaaagtctattcttggcctacattgatgatttatattttcctaaaaaatcatcagtgtcgcccaggtttgcagacttatttgcagagatttgcaaatttttcttttgaattttatatctgcgtcttctttatttttggtctgactacctactagtctaattaattgtttgaggccaggcacgttggctcacgcctgtaatcccagcactttgggaggccaaggcgggtggatcacttgaggtcaggagtttgagaccagcctggccaacatggtgaaaccccgtgtctcctaaaaacacaaaattagccaggcatggtagtgtgcaccctgtagtcccagccactcgggaggctgagacatgagagtcacttgaacccaggaggcggaggttgcagtgagccgagatcatgccactgagctctggcctgggcgacaagagcgaaactctgtctcaaaaaaatgaaataaaataattaatcatttaccccttacaaaaaaatccatttattaatgtatatactaactccactgtttttctgtttcttaattcactgatttctgtgaattcaccagttcgtgaaagatgacctggttctttctgtgttgtgtgtgggtgtgtgtgttcctcttctgacctcttgagttggacaattcagtcatttacctgagagttaatgggtcaagattctgtgatcttcaaggaaaacgttaagacgacagaggaatatcctggtagaggaccctggccccaaggtggtccccagtctcctgtttatgattagaggggtttggggtggtgattcaggttggaagagagaaagcgcagaaacacaagcctgggagcactggggatccatgtgatcgttccaggtaagtggggaagtaaatggagggttttctgacacttcgcaatctctaaattataatgacaccctcacaggtggaacagagctttggggagatgattgggtgacagttttttatccaagatttcagagaagagaagttaatcaggagagagagaaagagagagagctagagggagagagagagagggagaaagaaactaaatccgaagggaagtcagacactggaggtaggacgagagacaggattgggtgcagtgggcagaggtggtggggtcactgaggtcaggagagaagccaaaacatggacaaagaaagatgacgattcgcagcccaggagaggcagggaatcgggtcaggacagggagcaggaacagtgtcttgggtgaaggagggctgggaactgacagtttttatttattttttttgagatagagtctcactctgtcgcccaggctggagtgcagtggtgtgatcacagctcactgcaacctccacctcctggactcaagtgatcctcccgcctcagcctcctgagtagctgggaatacaggcacgtgccaccatgcctggctaattttttgtgtttttggtagagatgggggtctcaccacattgcccaggctggcctcaaatgcctaaggctcaagcaatcctcccactttggcctcccaaagtgctaggattacaggcatgagccactgcacctggcctatttatttatttgagtcagggtctcactctgtcacccaggctgaagtgcagtgatgcgatcatagctcactgcagccacaacctcctgggctaaaatgatcctcccacctcagcctcctgagtagctgggaccacacgtgtgcaccagcacacctggctaatttttgtatttttttgtagagatggaatctcactatgttgcccaggctccatttacttattaagtacttaatatgtgtcaattttagtgatttgtgtttttctagaaaataactttcatctaagtttatgaattttatgtagagaatttctgcaaaatatcttgactcttcattctttcttcatctatggtccttttctcttgtcatgtcttatttagtcagcccagaggttatctatttttattagctggagtcatgtgaaaccctgttgtcttggtcaaaaagtttaatatcagccatttcatgtgattcaacctaatgttatttaccaggcattttatacctgtgatctcatttaacaccctcaaaggccatatgagtcagggacaattgtcaccactctatagacaaggtgtctgaagctcagagaggttaactaacttgccccagaacacacagctgatacgtaatagggtagagatgtaaacgcagatggttctgaggatctttctgctttgtcctggcaattgctgctgagagcctcaggaagcatcacacctgtgacaagcttagaaaggccttctctgcagggggatgtgtacatccaggcgtggagaggtttgggtgggactctgggagaggcacagaggagcttatctttgggcagccgtgggctgggtgtggagctagtggggtccaggagaagcttgcactgaagtttttgtagagggcctacaggtgcaaggcacctgtagacgttgaaggtataagaaggagacccctaccaaagtctcatgtgtgaggagatttagcatctgaaacagtaagtaaaattaaagagttctggccaggcgcagtagctcatgcctgtaatcccagcactttgggaggccgaggcaggtggatcacctgaggtcaggagttcgagaccagccaggccaacatggtgaaaccctgtctctactaaaaacacaaaaattatccgggtgtggtggacgcctgtaatcctagctactcggtaggctgaggcaggagaatcgcttgaacccgggaggcagaggttgcaatgagccgagatcccgccactgcactccagcctgggcaacagagcaagactccatctcaaaaaaaaaaaaaaatcaaagagttctaacccaaggaaagaagagcaagcccccatccccaccatccttgaacaatatggggcctaatcacagaattacaagggcattgagacactgcacacacaactgcccagcaggcctgtgcccatctgcctggggcaggggccatgtgtcctctgcttggcagccaacactagcttcgagccatcaccttactctccttgctttgcatctgataattatttgggaaaatgtcagacataattttcaaggaagttcatttatttccgagatttaagtctaggagagctgggcaaactaaggtaagacacaggatgaaagttttcgtcagcaagccttctgcgtttgtgactctttttttttttttttgagacagagtctcaccctgtcactcaggctggagtgcagtggtgccatctcagctcaacataacctccgcctccagggttgaagcgattcttgtgcctcagcctccccagtagctgcaattacaggcgcatgccaccacgcccagctaatttttgtatttttagtagagacagggtttcaccatgtcggccaggctagtctcgaactcctggcctcaagtgatccacccaccttagcctcccaaagtgctgggattacaggcataacccactgtacccagccagtattcttgtcaaaatggcttgacaaccctattactgcccgggtttgccccttggtgggaccagatcagtgtgtgggccggtcttcctcttgcagggttgcccagggctggggtggccctcccgggagtgcaggtgcttaggggtgagttctcatgctcctggcaggtttggaagcaggaggcccctggtgggtgagaggggtgggaagggtaagggaaaggaggcagggggctggagaaaggggctactatgagcaaaatcttgagggtggtagagcagaaaagagaatactcaagctgtgatctggctgatggggctgatatgaggtgaaggagtcaggggctgagggctgggggtgctgatgtggagtcggggaatctttggaggaggtgactccagggcacccagcctgagctcttccggtctccatggaaagcctctgccccattcccacctgtgtgcggaggtagcctctcatcctcagtccccgctcctgggtggacaaggcctctctgcctgccgctgcctcctccacacccccagggtccatgcggccctgaccccagggcacccctgaccaggctcatctgaggaggagctgggactctggcttgtgttttccaggatgttttgctctgagcaaatgcaggaccgtggcgggccccgtggggggatccctgagtgtgcagtgtccctatgagaaggaacacaggaccctcaacaaatactggtgcagaccaccacagattttcctatgtgacaagattgtggagaccaaagggtcagcaggaaaaaggaacggccgagtgtccatcagggacagtcctgcaaacctcagcttcacagtgaccctggagaatctcacagaggaggatgcaggcacctactggtgtggggtggatacaccatggctccgagactttcatgatcccgttgtcgaggttgaggtgtccgtgttcccgggtgagcccctccttccctcagcgcctaaataggctcaggttggaattgttggggcaggaatcagatcagagacgtgaagcagacagtgtgtgtgtgtgtgtgcgtaagagagagagaggtgggggccaggggaacacagtcagggggtctctcctggagcagctgacatgtctgcccagtattgaagaagggaagggtccagtgacagggaggctgagagagcgttgcctgtgaaggagccaggagcgcacctgtggctcagccccaacggaagtgcagctgagtgggggaggggtggggctgaacagagaggctggggggccagatgggaagctgctgtcctcagggggagccttaccacatgacaggtcagatttgcagtgtagacagactcctctgcagcatggagtttcgcaggagcacctggaccctcatcagcaggatggaaaatcaggaccactgggagtggcacccgtgtcctgttcagaaatgcccagttggcccaggagggtcctggagagactctagccccagggtcctgcatcctgcccccttccttagtgggcagtttgtgtgaaatcaaaccaaaaaggcatcctgagtggtgggagagccagaggacagctccctgggtctgacttgtggttttgccaccagcatcaacgtcaatgacacctgcaagtatcactgcggccaagacctcaacaatcacaactgcatttccacctgtatcatccactaccctgtttgcagtgggtgccacccacagtgccagcatccaggaggaaactgaggaggtggtgaactcacagtaagcaccctagcccctgagacatggagggggccctgtgctaagaggaggagcccagggcggggaccttggccatgtgggccagctggaggtgtgcatcgctccctttgccccaggcccaggttggaagccatagtctgaacaccccggcttggacctgcccttggctttggaagggggctcaggtaggggggaagttggggggcagatggaaggaaagtgatagttactgacagctggtaacatcctacgaggcccgtgttagatgcttcacatgagtattctcacttgcctttcactgcagccctgtactgttgtcattccgtgtattagtctgttttcgcaccgttgataaagacatacccgagactggataaattataatgagaaagaggttttaatgtactcacagttccacatggctgaggaggcctcacaatcaaggcagaaggcaaaaggcatgtcttacatggcagcaggcaagacagagaatgagaaccaagcaaaaggggtttcctcttataaagccatcagacctcgtgagacttattcactaccacaagaacagtatggagcaaaccacccccatgattcagttatctcccactgggtccctcccacaacacgtgggaattatatgggagctacaattcaagatgagatttgggtggggacccagccaacccacatcaatccccattttacagatgagtaaactgagactcagcgaggtgaagcaatttgcccagtcaagtagctacaagaggctaaggctaagcttccaattctggtttatgtgactccagagccttgagttctcctctctaaatagtggttcttaacctttttcgggttcaccaaccccacatagaatctgacatctatggacactctccccagaaaaacacatgcagtcacaaaccttttctgggattcacggactccctattctagcacaaaaccccacaattccatcctggcactatccacccagagttagtgcagaccccacaggtgaagagcttccacatctaaatcagatcccacaagaccgccctgatttagatgccagtcgaactttggggatccccaggccaccacacttctgaccaactggatgcaaatttgggggttcccaggacccccccaggttcaataatttgttagactcagaactctggaaagcattatacttacaattacagttttatcataaggataaaggataaagattaggaccagccaatgcagagacacataggacaaggcttgggaggattcccaaacagtttctgtgccctctccaggtggaatcagggagcatcacctgcaccctccctgcggcacctcaatatatttatcaaccaggaagctcctccaagctttggtgtccagagtttttattggggtttcattacataggcatgatgtgattgaactgtctccacctccagtccctctttgggaggttgggctggctcagggctccaaatctctaattacgtagttggtctttctggtgaccagccccatcctattgtctcatctcttaccaaagtccaggtgtgattcatgaacaacaaagacactcctaatttttgggacattccaaggatttagagcctccctcctaagagctagggacaaaggccagccagattctttactggacaacatccataaacccctccacaggcttctgccaacatataagacaaggcaaaattcaggcttgaacatgccacttccagaagtttagcctgtagatacacataggtggcagcgctgagttctgtggggcctgaaggttgtgcagtttgcggggtgggttggtgggtgggtaatctaagaaaaagatgagaaaattatgaatgcaaacgtaggcatgaaggaaagggcccaagcaatggagggacctgaagctgggctgcatcagcctcctggtcaatctgctgctgcgtggtcaggtgtgaaaaggtggagctgcaaggcgatttataagcaacgtttaccattgcaaaggactggggaaatgcccattcagtgggaacatttaaataaatcacagtctatccatgtgttggaataccctgcagctataggaaagagtgagggacttctttatgtactgacgtggaaagacctctaagatgtattgctaagtaaaaccagaatagtgttagacgaggcctcctttgtgtgaaagagaaaggagatcccgtacattcgtatttgcttgtatacacataaagaaactctggaaggttcttaagaacagcacgtgtgtgtatgtggggaaattggggaatgtgtaaatggggggtgtgtagaaagggggctttatactgtctattttttttaattgaccttatctatctacttaaaaagttagagaaggagaccaggtatattggctcatgcctgtcatcccagcattttgggaggctgaggcaggagggtggcttgagctcaggagtctgagaccatcctgggcaatatagcaagattgagtctctacgaaaaatttaaaaattagccgtggtggcctgtgcctgtagctggaggctgaggcaggaggatcacttgagcccaggggttcaaggctgcagtgagccatgatcaccactgcactccagcctgggtaacagagccagatcctgtctcaaaaaataaaaataaaaaataaaaataaaaaagtaagttggagaaggcaagttggccccgcccttaccatcctgtgcctcctccaggctcccgctgctcctctccctgctggcattgttgctgcttctgttggtgggggcctccctgctagcctggaggatgtttcagaaatggatcaaaggtgagttggctccccacacccctctgccccacctggggtggtcagaccctgaccacagacgctcatcttcaaagctatgtccacgtcccacagtattgctatgacatgtgacacccagaccacacatcctaggtgatcctacagggcaggtcccatgggaggcatccttgtgcgtggtggttacaggctgtgagaggtggctcccaagcaggaggctttcccacttccaggccaagggtggttgccccatgaagcaatgaccctcttctgtttaaaaccctggcatggtgtgctgggtgcagtggtgtgcatctgtagttccagctactcaggaggctgagatgggaggattgcttgatcccaggaattcaagaccagcctgcgcaacacaacaaggctcccgtgtctataagataaaataaacccttgcatggtctcccccaccataaaaagtccaggtatctacaggagtcactgccctccacgatctggctctacccacctccctctccccatccgcgcaccctggaaaccaacttcttgtatctcctttaatgacagcctcaacctcagcctctcctctccttctgggtttgctctgggctggagggcctcccctgccccctctccccagctcactcccagtggactccaacagtggtcctcagactttcttttctctgggaccttttctttgactccaaagagtggcttggggcccctcctggctatacctctgctgtcacagccttttgggaaccagactgtcattgctggtgtcctcatctgccttcccacaggcatgtgcttcaaggaggtacagaaccaatatttgtcaaattaatgtgttattcagtatctccagctgcaacgggcaccccaggggcctccaggcaatctctagtccagctgccctcctctgagctcagattaaaagagagaacaggaactcttggcactcagtaagtagatgctcaataaatagctgataggcaaattgaataagcacaggaacagaggaacaagtggaggtgtggccaccagtcctctagattgcagatccctggccgaggtcaagtgtaagcctgaagcttcctccctgttcggagagttgaagattccacaggcagaagattctcaggggaatctttgtccaaagccttccaagactgcagtgagactggggtgggaagagatggggttatcctgtcccatagctgcaggataagctgctgcatgcttggtggggggcactgctcacacatatccccagtgcctcctgtggcgcccaggcttttggcggagaaatcagcctcagtagatctgtgcagggtgtatgggaagaaaaccacttcctctttcccatctgctttgtgtgtgtcattttctggtaatcccatcctaaacttcagcacccacgtggatgccactgggttgtctcagttctgagcccctttcggtttcctttgtgccctttcacccagaaagtctctggctcctcaaagagcctcctccccccttgaaaaggatgtatgtgattattgtaggaagtttgaaaaatgagcaaaagcacaaagaaggaaataaatcccccatcatcgatgataactaaaaaccccaccacctagagaaaaccagccactggcccctgaggtatatccttccagtctttttttctatgcctatgtaaatgcatctatgatttctttttttttctcttttttgagacagagtctcactctgtcacccaggctggcgtgcagtggcatgatcttggctcactccagcctcgaccccccactgcccggggctccagtgatcctcctgccttagcctcccaaatagctgggactacaggtgctcaccaccacgtctggctaatggttaaatttttttttttaagagatggggtttcactatgttgcccagcctggtcttgaactcctgagctcaagcccagagtgctgggattacagatgtgagccaccacacccagtcatgcatctgcgatgtcttaacaaattggcctcataccactcattctcttttaaacctacatttttgcacttaacatatggtaccatgttcccagctagtaaatgttctaaaaatcacagacgcagagtttactggtgtcttaagcttcctgtaacccatcctcagtaacaagataaaggctttctattcaaacatttttgactctctgtcccctgctttgcaagtccgtgccccatcccctgactgtgtggctggggctgacttccccttgccctgcctggagcctgacacctgcctcatcacacctactccccactctttcccccagcccacatttgtcgttcattcattcgtacaacaaagctgtcctgagcacctactgtgtgccaggcctgtgctgggccctggggacaacattgtgactggggtagactgggtcttaccttcagtgagcttcccctaccgctggctcccccaaaccttctcactaccaccctccttcccgggcgttgaactcctgtctcttccccaccagctctttttctccttcccatcagaacacttgtcccaggtggggacagggagggcagtgtggtgcctgcgcacagcacttggaagcagggcacttcgcaccccagagtacccggctgcgcactccattaggtcagctgtggctcagcaagcccgtcactatacgtggtcttgtgtctcccaaccgtgggctcctcccctttaattctgggggaggagcccacagatccccacagcatccagtgcagtgggctctggggttgcctggctgtggacctaaccaagggcatcagcagcgtgtgtgtcacccgctgcccacgtggtccgggctcctggggtgaaagggttagggtgtacagggctgtgctcataggcagcacccttatagagcaggtgccagcagccaagggctgtgtgagcctgagctggcgtccctggggctgacaggcctccttccctacggcctggggcagcaggcaggtgggctgtctgggagggcagacctcaggcacggggatgggagcagaggccccagcaacttcccacagtctgatgcagccctaagccccagatgcacagggcttttcagtggcatccttcctcccctggaaacatttgtgtgagatcccgtgttgagagcttgttttggtccctctcctccagctgggagctttctttcctttctttctttctttttttcgtttttgagacagagtcttgctctgttgcccaggctggagtgcagtggcatgatctcagctcactgcaacctccgtctcccaggttcaagcgattctcctgtctcagcctcccaagtagctgggactacagggcgtgtgccaccatgcccagctaatatttgtatttttagtagagacagggtttcaccctattggcccggctggtctcgaactcctgacctcaagtgatctgccctcctcggcttcccaaagcactgggattacaggcgtgagccaccgcacccggcccagctggaatctttctatttctccatttattcactcatcctgtgctcgttcattcatttactaagtcactaattcactcactcaacaaacccttgagttcctaccatgcttcaggcctgaagggataggtccccagggctgaggtctctagggaaaggccttttcccagaaggcttgtaaggtcctccatcctggccattgttccgggattcaacctccttcctctcctcttgtctctagctggtgaccattcagagctgtcccagaaccccaagcaggtaagggggctttagcaggaggtgtatcaggtggctgggcggagggtacagaggctgctggggagttggacagtcccatcggccaacggaggttggatggagcggggagctcacccagagcaggacgaatgatgctgggagatgtggtcactaggtcttgttctgagtcctggccagcctgtcccctccccaccaaggcaaatggaatgaagggaggccctcccagccaagctgacctggggaacattaaactactggacggagtggggtggaggcaggaaggggaaggtgggggctgaggtgctcagagcatagaggaaggggagacacatgcagagacgcagggacagaggctgcagggctccgtggacacccacctgggacctcctgcccacccaggctgccacgcagagtgagctgcactacgcaaatctggagctgctgatgtggcctctgcaggaaaagccagcaccaccaagggaggtggaggtggaatacagcactgtggtaagtgcaggagcccggcttttgggcatgcggcccctgggctgtgccagggcacccctgggagggtgggcagaaggggaaggaaggggtcggcttggtgatcttgtgcctgtcagggacagggccacatggagatggagcaagtgtagattttgccagagcagaggtccttaggagggcttggtgtcattgtggtggggggtttttgggggtggccagcagctatggctctgacagtccgtgaagtccagcatgggttaagcacctgctgtgtatcgtgagccaagctgagaacctgtgacttctcactgttttggtctcatcatctctttgacatcaattctgctttcgggtttttgtctgtgacccgctgtgggtcaacccttgggcgcagccaccttcaactgggatgatgggatgggggctgcctccctgggtcgtgacccacctgctagtgggagagttcaagcagaagctgggggtcacttggcagagaggatcgggagggatgtaagcatcagcagggaagcttaaagtgcccccaggcctgggagctgaagaggcccctcagacaagtcgtgtggtgccatggagggctggcaccagggtgacaggggacattgttgctggtctgcctggaaaagtggcccaactccctgggatatctccagcctggtaccgttctccccaggccgccgttttgcacctgacaggagaagaggggatccagacctgccacttccgggtcccctgatagccgcaccgttccccaacctcccgccagctgtctgcatgaggatgagggtggtctgggggcccagggtcctggatggctcctggccaagttccttccttccttccttcctttctttctttctttctttctttctttctttctttggaatctcgctctatcccccaggctggaatgcagtggcacagtcttggctcactgcaatctctgcctcccaggttcaagcaattctcctgcctcagcctccagagtagctgggactacagacacctgccactacactggctgatttttgtatttttagtagagacggggcttcaccatgttggccaggctggtctcggactcctgacctcaagtgatccgcctgccctgacttcccaaagtgctgggattacagtactgagccaccacacccggccagctcctggccaagtttctgagcgcccctgcactcaagcctgactccttccttgcatgacatgatcttgtgtccacgaagctgcatggcctgggaccagcaacagccttgttctaacttgttgtctcatgatttaaagtggatggcacatggtcttactcttctcccagcccccttggtacaagttgggactcatgcccacagtacagcaagttaatcagagctgcagggccaacgcagtacccctgtactggcttcaactccacctagagaacgaggggtcctctgcagaaagggatccatggctgcttcgttgtgagaactttcctttttttttcttttcttttctttttttcttttttttttttgagacagagtcccactctgtcgccaggctggagagcagtggtgcaatcttggccattgcaacctccgcctccccggttcaagcgatcctcctgcctcagcctcccaagtagctgggattacaggtgtccaccaccacgcccagctagtttttgtatttttagtagatactgggtttcactatgttacccaggctggtctcaaactcctgacatcaagtgatccacccgccttggcctcccaaagtgctgggattaagggcgtgagccactgtgcctggcctcaagaatatttcattaagagaagcacagaggtgtcttgggggagcccagccaggtctcagggcctcagtttcttccctgtagaatggaccaggctgggtcagccctgaggagcccccggagcctcctgcctctgatgctggggatgttgtgctgctgcttgcccagttggggaggagcagctgggtggacaggatcatagagaaaaagaggccaggacagtggagcctctacagtgaggcctccccaaagcccctcaggtgtcctccctcctccatcctatgttgggggtcctttcttcccttgcctctcccaagtcttcagtttcttggtttctctctgcaggcctcccccagggaagaacttcactatgcctcggtggtgtttgattctaacaccaacaggatagctgctcagaggcctcgggaggaggaaccagattcagattacagtgtgataaggaagacataggcttttgtcctgcctcgccatcggagctctcatgggccccaggaagtccagggacagctcccttatacctggcccacgtccttctcagcctgccctcgacaacagtgaccaacagacaggcagctgggtttcccaggccatccctctgttgccatcagcttgattggcttccccgagggccagcagggctgggggctccggagagcagcaggaagcactcccagccaccagtgcctgtcacctctttcccctttgcccctgcttcatcccagctctgtgtgtggaggacaaagcttcttcctgcgtggctccaggaaaagatgtggctcacgtaggtggcacctgccaatagctttgtcaatcacagccccataggaacgtctggaattgcttgggagttggggagaactgtcaagaagagtgaagagagtgccaaagcggagatctgttcacctgggggccatggaggggggacccactaaagatcaagatcaaagattctccccatctcacagacaaggaaactgaggccagagggaggagagaattgctcatggctccagaactggtggcaagtttctctggactcttaggtttatttttaatatgaaatataaaaacagtttcaaatatcttattgagggagaagtaaaaacttatttaaacaatgcctgctatgtgtctgcaatcctctgcaaaagaaagctcccagctttgataccagatgagtgcagagaagccttgtgggtgcagtgggttggggacatcctaagagaagtcctcactgagtgggagaaggtgggtcacagctgcttcttgccatgatgtctgtttgcttgtgtgttttttgagatggggcctcgctctgtcccccaggctggagtgcagtgatacgatcacagctcactgcagcctggaattcttgggctcaagtgatcctcctgcctcaccctcctgagtagctgggactacaaacacatgccaccatgcctgaattttttttttttgtaaagatggggtctcgccatgttgcccaggctggtcttgaactcttgggctcaagcgatccttttgccttggcctccctgagtgctaggattacagcatgagtcaccatgcctggcagtttgcatgatggaaaacacagcagttttcttgtcgggagatttgaaatttaatgcaaagagttgtccaggctgtcttgagtctgtggcagctgccaacagctttatgtttttattttttcattttaatttttcttttttagaggcagggtctctctgtgttgctcagccttgaactcctggagttgtgcaatgtggactcctggatctgaaaggtgaggctgccatgaagcctataatgtgggtcggggcttagacatgtgcctggtacggaggggaacccagaaatagttgttgacttcacttgaattgagcccggtcacgtttcagtcctgatctgcagtaacccttctcaggttcctgtttccagagacagaattccacagggtggtttaaaacacagaggttcgtggcaccagactgactctaagactcaggggattgttcgaaggaccccttctcctcaatgggagtgaactttaattctctgaaatagtattttctctttaattcggtctaaatttctatcaattagaagtaagtcctctgtaaaatgcaaatgtctaggctatcagttggttgtcaatgccggctgctataactaccacaacctccacaataaaactgggtggagtggcggggtgaggctggggcaggagggtattgcagccacagccacacgctggccccagccccctgccccgtcaatctctaaggcttggtggtggaataagttccccggtataaaccatttgccctgtggaaggtggcagccccttgggagtccttcatgtcatttccttgccagagagtctcagttgggaccacccccattctccaaggaggcctcatagcaggagggagcgggctggcttgcaatagtcttctggaagtcttactgtccaactcccttccaggatgctctgcataccaaaggacactgggaagaaccatctttgtcaaaccagagacagggtcttcatctgttgcccaggctagagtacaatggcacaattattgctcactgcagcctcgaactcctgggttcaggcagttctcctgcctcagcctcctgagtagctggaactacaggcatgcgccaccacacctggctaattttttgtagagacagggtttcatcatgtggcccaggctgctcttgaactcctgagttcaagcaatccacccacttcagcctccgaaagtgctgggattataggcatgagctaccatgccctgcccacactcaaaatttacaggagaatatacagtgaaaagttggtccctttatttctgtcaccaggcatccagagataaacaaggttaatagtttcttgtgtttctcccctgagatagttaatcatttgcacatatatccatgtatatacggcctatatgtatatgctcctccccattcccatatgtggggatatcctccccattcccaccattcctgcacagtagtattttcatgtcacaaccatcttggagattattttaccttcttctataaatgctgcagaacatcccataacattccattgtttgtaccatgacatacacatgccattttgcacattttcatagacagctgaagggtaaagttggagaaattcaaagtccgtgcacttgtaattttgatagatattgccaagcatatggcaactttaaatagcaatctttggccaggcatggttgctcacgctgaatcccagcactttgggaagctgaggtgggtgggtcattcgaggtcaagagtttgacaccagcctggccaacatggtgaaaccccatctctactaaaaatacaaaaattagctgggcgcagtggcatgcacctgtaatctcagctacttgggaggctgaagcaggagaattgcttgaacctgggaggtggaggtggcagtgagccgagatcatgccattgcattccagcctgggcaacagagcaagaccccatctcaaaaataaataaataaaaaggaaaaaaaaagaaatagcaatctttttatttatgtatttattttttgagacagatcttgctctgtcactcaggcagagtgcactgagagtgcagtggcttggttacagctcactgcagcctccacctcctaggctgaagcaattctcccacctcagcctctggagtagctaggactacaggctcaggccaccatgcccggctaactttgtttatttttttctgtagagatgaggtctcactaggttgcccagttggtcttgaactcctgcactcaagtgatcctcctgcctcagcctcccaaagtgtggggattacaggtgtgagccaccatgcccagcttgaaatagcaatctttaatttccaccttactagttatccctctacacccaaaactgacgtattaatttttaccaagtgtattagtttgttttcatgctgctgataaagacatacccaagactgggcaatttacaaaagaaagatgtttaactggactcacagttccacctggctggggaggcctcaaaatcatggcagaaggcaaggaggagcaagtcacatcttacatcaatggtggcaggcaaagagagagcttctgcagagaaacttccatttttaaaaccatcagatctcataagacccattcactatcagaagaacagcatgggaaagacctgcccctgtgattcagtcatctcccaaaacaagttggaattatgggagctacaagatgagatttgggtgtggacacagagccaaaccatatcatttcactcctgacctctcccaaatctcctatcttcacgtttcaaaaccaatcatgccttcccaacagtcgcccaaagtcttaactcatttcagtattaactcaaaagtccacagtccaacatctcatctgagactaggcaagtccctttcacctatgagcttgtaaaatcaaaagaagtttagttacttcctagatacaatgggggtataggcattaggtgaacacagccattcggtgaacacagccattccaaatgggatacattggccaaaacaaagggcctacaggtctgatggaagtctaaaatccagtaggacagtcaaatcttaaatttccaaaatgatctcctttgactccatgtctcatatcaggtcacgctgatgcaagagatgggttcccatggtcttggacagctctgcccctgtagctttgcagcgtacagcctccctcccagctgctttcatgggctggcgttgagtgtctgcagcttttccaggtgcacagtgctggctgtcagtggatttaccattctggggtctggaggatggtggccctctactcacagctctactaggcagtgccccagtagggaccctgtgtggggtctctaaccccacatttcccttccacactgccctagcggaggttctccatgagggccctacccctgcagcaaccttctgcctggacatccaggcatttccatacatcctctgaaatccaggtggaggttcccaaaccccaattcttgacttctgtgcacttgcaggctcaacaccacatggaagctgccaaggcttggagcttgcaccctctgaagccacagcccaagctctatgttggccccttttagccatggctggagcggctgggatgcagggcaccaagtccctaggctgcacagagcaggggaaccctgggcctggcccacaaaaccactttttcctcctaggcctccaagcctgtgatgggaggggctgccatgaagacgtctgacatgccctggagacattttccccattgtcttggggattcacatttggctcctcgttacttaggcaaatttctgcagccagcttgaatttctcctcagaaaatgggattttcttttctatcacattgtcaggccataaattttctaaacttttacactctgcttcccttataaaactgaatgcctttaacagtgcccaaatcatctcttgaatgctttgctgcttagaagtttcttccgccggataccctaaatcatctctctcaagttcaaagctccacaaatctctagggcaggggcaaaatgccaccagtctctttgctaaaacataacaacagtcacctttactacagttcccaacaagttcttcatctcaatctgagtccacctcagcctggatttcattgtccatatcattatcagcattttgatcaaagccattcaacaagtctctagcaagttccaaacttacccatattttcctgtcttcttctgagccctccaaactgttccaacccctgcctgttacccagttccaaagtcacttccacattttcaggtatctacagcagcaccccactctactggtaccaatttactacattggtccattgtcacgatgctgataaagacatacctgaaactgggcaatttacaaaagaaagaggtttaacagacttacagttccacgtggctggggaggcctgacaatcatggcagaaggcaaagcaggagcaagtcacatcttgtgtggatggcagcaggcaaagagagagcttgtgcagagaaactcctatttttaaaaccatcagatctcatgagacccattcactatcacaagaacagcatgggaaagacccgcccccaggattcagtcatctcccactgggtccctcccacaacacatgggaattatgggagccacaaggtgagatttgggtggggacacagagccaaaccatatcaccaagactatataagacctctatggagagaacaataaaattccaataaaggttacagaagatgatctgaataaatggagagatcttttaggctcttacttcaggtgacttaatgacaccaagatgtcgagtcttcccaaattaatcaatatatttgaccgggtgcggtggctcacacctgtaatcccagcactttgggaggtcgagatgggcggatcacctgaggtagggagttcaagaccagcctgaccaacatagagaaaccccatctctactaaaaatacaaaatagccgggctgaattagcttgttgggaactgtagtaaaggtgactgttgttatgttttagcaaagagactggtggcattttgcccctgccctagagatttgtggagctttgaacttgagagagatgatttagggtatccggcggaagaaacttctaagcagcaaagcattcaagagatgatttgggcactgttaaaggcatcagttttataagggaagcagagtgtaaaagtttagaaaggttgaattagctatttgtagacctttattccattgaatgcattttaaaataagcttattatgttcctcaaaaaaattcctttttattaggagtgtattgaatgtattgattttttttttgagatggagtttcactctttttacccaggctggagtgcaatggcacgatctcagcccactacaacctccacctcctgggttcaagcgattttcctgcctcagcctccctagtagctgggatcacaggcatgtgcaacctctgcctcccaagctcaatagatccttccacctcagcctcctgagtagccatagatttgaggaaataatgaggagccagaggaaactgtcccgtctcagactagaaaaggggtggcctgaagcggagatggggaggggagagagcgcgagctggtgggacccagggctgggccgacctggagttgccaagagaatctgcaggagacactgctgcccagtacagcaaccacaggtgagcatggagccctcgggaccggccagtccaaactgaaatgggctttgaatctacgacttactgcaaacgacaggatgtcaactatctcattgataacacaatgagtacctattggactgaaggactttgtgtgtgtgtgtgtgtgtgtgtgtgtgtgtgcatatacattttttttttgagacatagtcccagggaggagtgcagcagcatgatcatggctcactgccccttcaaactcctagacttatgtgatccgtctgcctcagcctcccaagtagctgggaccacaggcgcatgccaccaggcctggctaatttttttgattttttctagagatggactctcacttttttgcccacactggtcaaactactgggctcaagacatcctcccctctcggcttcccaacaggttaagattacaggcatgagccactgcacccagcctgataatattttgggggtaaataaatattggggtgaataaataaaaatattatttcaaatatcagttatccaaattgattatgtaatatttaatcaaattgattattgattattcaaatatcaaaggtgactttgatcttgaattcagttaattgagccttaggagattacggacccctgtaaatccaagctccctgctcctttctattcactggcattctagactcattcaccacacacattaactaacagacagatgccagcgtcgtgctttacctgttaaacagttacgagtctggttggtacagccagactgtctctgtctgcatgagccgggtacagaaaggggccactccagtgttttacagatggttctaatatgttattactaaacacttgccacaacagcttgcataggcagctgaggtcactcggtcacctcaacattctgtgatcagccacatgagctgttgggttttaccaggaaaagagtgactagttatgcttctcttttttaattttaatttttttttttttgagatggagtcttgctctgccacccaggctagagtacaatgacacgatctcggctcactgcagcctctgcctcctgggttcaagcgattctcccatctcagcctccagagtagctgagattacaggcacatgcctccatgcccaactaatttttgtatttttagtagagacaaggtttcaccatgttggccaggctggcctcaaactgctgacctcaggtgacccacccgcctcagcctcccaaagtgctgggattacaggcatgaaccgccactcccagcctcctcttataatttatttaaaaggccatggtgctttatagaacagcttaacaattactgagaagaaagaaagaaggaaagaaagacagagaggaagaaaggaaggtaattcacatgcagagagaacattccactttattctttttgtttttttcagggaatgggtgagctgaggggtttattcacacaacagaatgctttgcagcagtgacaacagattgcctttttttattttatttcattttattttatttgagacagggtcttgctctgtcacccaggctggagtccagtggtgcaatcttggctcactacaatctctgcttcccaggttcaagtgattcttctgcctcagcctctccagtaactgggattacaggtacatgccaccatgcccggctaatttttttgtacttttagtagagacagggtttcgccatgttggccaggctggtctcgaacttctggcctcaagtgatcctcttgcctcgatctcccaaagtgctgggattataggcatgagccaccatgcctggccaccttctttattttacagaagagccacgggccagagaggctacttgaaatgacaaatgccactccattgggtgataatatctgaaccttgaatctaggaattctggatcttagcattaaaaacaacaacaatgaaaaaaaaaaccttgtattttgaaacaatttcaaacttaaggaaaaattgtggaaaaggtacaaagacctcccgtatgtcattttcccagatttacccttttttttttttaatttgccacttttttgttactctgtttctatctatgcgtttttccccagaaccatctgagaacaggttgctgacactgtctttgtctgcatgtgccgggtacacaaaggtgccactccggtgttttctgaaagtagctggtgaagccttcccgtagttgtgccttgtctttgttttacaatccaagttcaccttcaaaatacagcgcctcacttggcatgtccaatgccaacatgatagatattcggaggattaaataatgttaggttaatcatcaatatgttcacaattggtccaaggaggtgaaagacattttctaattagcccaagccttttagaaagatgactcagggctgaattatccacagtttagaaaatgacctcacaattatgtttctttgtttttaaagtttactgtttgggcaaacaccagccctggtttgtagacctgactctgcctgggaaccaaacatagagatttgatagccacgtatctccaccctgtggccatgcggggaatcacacatgcctggattcccaagcctgttgaattcgttggggttggtctgtcaacgccaaaggaattctgtactttctgggtcaatgcagctgagaagcgggagggcttgaaacaggggaacagacagaaaactcctgcatggctttccagcccctctgcacgcccagtccttggatgttttgtgccgaaagaaaactcaactccttggccgggcacggtggctcacgtctgttatcccagcattttgggaggccaaggcaggcggatcacttgaggtcaggagttcaagagcagcctggccaacatggcgaaaccccgtctctactaaaaatacaaaaattagccgggtgtggtggcggacacctgtaatcccagctacttgggaggctgaggcaggagaatcgcttgaacctgggaggcggaggttgcagtgagccaagatcgcgccattgcaccccagcctaggtgacagagcaagactctgtctcaaaaaacaaacaaacaaacaaaacaagaaaactcaactcctctctaactttgagtttctttatttcatatccaattgtcccttcccaattcctagattttcccaccccgactgcagtgtgtcaaaggcaagggcagccaccccacctgtggttggtgtcatgggtttggggtcagatagaacaggccttaaatcccacctctgcccttgtgacctacatggtctggggctgccattcaaggccatctgggtctcagtttcttcatttgttccagcaatggtccagtgcccctccagtgcgttcaccctcaccaggctctgaagcaagctcttatttatttatttctattttgagagggagtctcagtcactgaggttggagtgcagtggtgcgatctaggctcactgcaacctctgcctcccgggttcaaatgattctcctgcctcagcctcccaagtagctgggattacaggcacctgccaccacacctggctaatttttgtattttagtaaagatggggtttcgccatgttgcccaggctggtctcaatcccctgacctcaggtgattcactcacctgggcctcccaaagtgctgggattacagatgtaagccaccgcacctggccactcttatttatttatacagacagggtctcaccatgtggtcccagttgggcttaacctcctggtctcaagcaaatctccctcctcagcctcctgactggctgggaccgcagtgtgacccactacacccagctgatgcaagcccttaacaaaaggccctgccattctctccctgggcatcctcatgctgtttcgtcacctctgggactctttctaagcacccctgacctgcatcctcattgtccaaaatttctttgctgtcgattctttcctttgctcctgttctcgggtcctttgaatttgacctttggactctcccctttgacctacattctgcaaatctggccacatggtgcattggagcccgggacctactcctgaagcccaggctgagggcaagctctgggttcctatgtgtctggtaaggaaagtgggaaatgggaacagcaggttctaccttccaggagtgttgagagttacaggaaagaattgagtagagtccttgatcccaaagtattctctctgtatatgaattacctccctttcttcctcccttcctctttctttcctgtcttctttttttctctcttctccgtaattgttaagccattcttttttttttttttttttttttttgagatggagtctcgctctgtcacccaggctagagtgcagtggcacggtctcggctcactgcactctgcctccccggttcacgccattctcctgcctcagcctcccgagtagctgggactacaggcgcccgccaccacacccggctaatttttgtatttttagtagagacggggtttcatcgtgttagccaggatggtcttgatctcctgaccttgtgatccgcccacctcggcctcccaaagcgctgggattacaggtgtgagccaccgcgcctggcttgttaagccattctataaagcacaatgaccttcttaataaattattaaagcataactagccactcttttcctagtaaaacccaacagcagatgtgcctgctgttgaccaggtgaccgagtgacctcagccgcctatgcaagctgtggtggcaagtgttcagtaataacataatagaacaatctgtaagggtggcagccgtaccacccagatgcagtggctcatgcctgtaatcccagcactttgggaggccaatgtgggtggatcacttgaggtcaggagttcaagaccagcccagccaatatgcgaaaccctgtctctactgaaaatacaaaaattagctggggtggtgcgtgcctataatcccagctacttgggaggctgaggcaggagaatcgtgtgaacctgggaggcagaggttttagtgagctgagattgcaccattgcactccagcctgggcaacagagtgagactctatctcaggaaaaaaaaaatatatatatatatatatatggtgaagcacgatgctggcatctgtctgtgagttaatgtgtgcagtggaagaatctggaatgccaggaaacaaaagggatgatgggttatgaggaaggagcagggcgctttgactgacaggtgtgggtaatcacctgacacacaattaactgaattcaagatcaaagtcacctgcagaatatcaatgggctaagctgctctgccttccacagaagcagaacaggatcagaaaactccctctctaagcattccgtacctgggttagcaagagtgtcacgaatgtccaaacttgctagattatcaatctcacaggccatcagctgacccaaaggacatggggtcaggagaaagttctgcataagattctctacaagtgtcagagaaagagctctgggaaatgggattttggggccattttcactcccatcacaaacgaagtagaagcagcttcatccccactgagactgtagctggcctctcagagcctcaggaaaaccttggagtgtgaggggaggagggggagcttcatgacgagagagctgaaactccataatcaacacggtgtcaactggaactttctccttagcctctggatttcacatttcccttaggagaatctaatgtctacctctttatttggcagtcttatatggaatttatgtagaatgttgctttgaatcttctcaactaattcccattctgatttttttcaacttaaaaatttttatttttattttttgagacaggttttcactctcttgctcaagcttgagtgtagtggtgcaatcatagctcactgcaaccacaacctcctaggctcaagcaattctcccacctcagcctcccaagtagctgggactacaggcacataccaccatgcccagctaatttttttgcttttgctttgtgtatgtatgtgtggttttgttttgttttgttttgttttgttttgttttgttttgtagagacagggtctcactatgttgcccaggctggtcttgatctcttgggtttaagtaactcccacctcagcctcccaaattgctgggattacaggtgtgagtcactgcacctgaccccattctgattttttaaaaatttatgaataaataacctatttagacattttgaatcagaggtacgtggacccaactaatcatgtggttactatcaggaagccaggaccaggaatagtggttagaagaagaaccaagtcatccattcatccatccatccatccatccagtaacgaatatgtatgatatttttcctatatggggacacagtctagaaggagcttggagaccagttggggagcctgataacattaagtgtcaaaatgttactacaaaatgtcctgagttacaatgatagagaaagtcaaggagtcctgggagcaggcaggacaggcacatcccactgtggtggagggcaagtaggcacctgtgtagcttcctgaaaatggctcttggatggtggatggagtcttacaagataagcaagccgggtgcctctaaagcaaagtgcatggcaagaggtttggatgaggcagggcctggggaggaagagctggccactccttcctgttggagcagaaaggggaggcctcgagtggtgggaagtgagggcggagggagaggccagctcacagaacatcagcttcactgacaggcttcaatttcattttgcaaacaatttagaagccattaaaagtttttttttaggccaggcgtggtggctcacgcctataatcccagcactttgggagtctgaggcaggcagatcacctgaggtccggagttcgagaccagcctggccaacgtggtgaaaccctgcctctactaagaatacaaaaattagccaggcgtggtggcgcatgcctataatcccagctactcaggaggctgaggcaggagaattgtttgaacccaggagacggaggttgcagtgagccaagatcacaccactgcactccagcctgggtgacacactggactcgatctcaaaaaaaaaaaaaaaattttttttatattaactacagaaaaaagatctatttgttgtaaaaaaaaaagttagaaaatacagacaaaaagaagaaaataacaatgttcatatatctacattttttccttataaaatatgggttcaaataacatatactcttaaaatttgtatcatgttccttttatggatgtaatgtaatttatttaaccatatctttactgttggggatttaggatgtttctagtttcttgctattataaccaattatgtgaccattcttgcacataattatttctttaggatacactcttagaaatgtctcggcccaggggtagtatattcgataggatttgggtgcaatttattctcctatcagcctggtatggaaatatccttcagcatatcccatggccaacattgggaatggtgcctttaaaaaaatgatttaaacttctgccaattacaaataaatagttctcattgcttttaaataaataccattaattctggccgggttctgtggctcacgtctgtaatcctggcactttgagaggccaaggcaggcagatcacttgaggccaggagtttgagaccagcctggacaacatggtgaaaccccgtctctactaaaaatacaaaaagttagccaggcatggtggtgcatgcctgtaatcccagctactcgtgaggctgaggcaggagaatcgcttgagcccaggaggcggaggttgcagtgagccaagatcatgccgctgcactccagcctgggtgacagagcgagactccatctcaaaaacaaacaatcaacaataacaacaaaaagaataacattaattcagaaaagtgtgtatcgttccatatccagatgatgtctcttaacacacacacaaaaagaaaagtaaaaattatttaattagccaggcgcggtggcaagctcccataatcccagctactggggaggctgaggcaggagaattgcttgcacctgggaggcagaggttgcagtgagccgagatcgcgccattgcactccaacctgggtgacagagcaagactccatctcaggacaaaaaaaaaaaaaaattttaaacccatgtgcaatggacagaaaattaaaacagtacaggaagttataaaattaacaaaaaagtctccttcctcctaccctacccctagtaccattccacaaaagtgactactgttagccatttcttacacagctttcagaaaacttattattatttcaaaattattttcaaaagggctaatccaggcgcagtggttcacatttgtaatcccagcactttgggaggccgaggcaggcggatcacctgaggtcaggagttcaagaccagcctggccaacttggtgaaaccctgtctctactaaaaatacaaaattagccaagtgtggtgacacacacctgtaatcccagctacttgggaggctgaggaaggagaatcgcttgagctcaggaggcagaggttgcagcgagtcaagatcgcgccactgcactccagcatgggcgacacagcaagactccatctccaaaaaaagtggggggaggggctcataattcttcatacctcacttttgcatatgtcctagagaccttgttatacaagtacacacaaatctacctcattcttttatatgtgattccacagttttaattcattccgttatttactcatttacttgatgacttttattgaatacctactatataccatggagctatacagcagagacatagcagtgaagaagataaatgaggccccttctgtctggtccttgtatcttagtgggcagtagacagaacaaacaaaacaaaagcaagcttcgttcagatcatcacagaactgctgtgtgaagatctgaattgtgtacagctgagagtgatgagaggcaggaagggctgcttgcatagggaggtcatggagggacttcctgacatttgagctgagacttgagaaggagccagccacacaataatatagagtgagagcattcctggcagaggaaacagctcaggcaaaggctctaagggggaacaaggctagtgtgtcccaggcttagggtgccggccagatgagtacagagtagacaatgtggggagcttggtgggaggcagacgcagaaaggcagaggcaggcagtggtcagatcagggaagggttaatacgcaaatgtgtggattttgtcctaagtggaaactctgaaaaatttcaagcaagggagtcacacaatggcaccttggaatggggtggtggatgtggccattggagaaggtggacaagctcagaatgcattctggccgtagagccaacccaacaggctgaaggattggatgtgggagggagtgaaaagaaaggaataaaaattgcaggtgacttctacggttttcacttgagcaattgggagggcagtaaaggtgggtccctttacggaaatggaaagactaagagagcagcagttttggggtggaattggggagaggaaacagggactctgttgggcgtacagatgctcaaataaagatgacaagccccctattggctgtatgagtcaggcgctgggggagggactggagctgtaggtgcacaatgcatgccgatgtatctgtgtgtcatacaaggccccatgtatgactgcgtgtgtatacacatgcacagatgcacacattgttatgtcatcccagaccatgtttttgtatttttgtacctgtatcttggtatatatctgagtatatcttttttttttttttttttttttttttttgagacagagtcttgctctgttgcccaggctggagtgcagtggtgtgatcttggctcactgcaacctctgtctcccgggttcaagcgattcttctgcctcagcctcccaagtagctgggactacaggcgtgcaccaccacacccagctaatttttgtatttttagtagagatggggtttcaccgtgttggccaggctggtctcgatctcctgacctcgtgatctgcccacttcagcctcccaaagtgctgggattacaggcgtgagccaccacgcctggcctatctgagtatatctttaggagaaatttccaatagtggagcattagtcaaaaggtccatgaattgacttttttttaatagatcttgacaaattttccttcaaaaagctcttgcccactgtcatgccaagcgtcaggttccagcccatgttgaggtctgaggggagtgggtggatgggtggcgaatagcggaaggaatatttagggggctgtaggcaggtaaaatatggttttattcagcagctttttcatcagcagttttttttatatactttaagttctagggtacatgtgtacaatgtgcaggtttgttacataggtatatatgtgccatgttggtttgctgcacccatcagctcgtcatttacactaggtatttctcctaatgctatccctcccccagccccccaccccttgacaggccccggtgtgtgatgttccccaccctgtgtccaagtgttctcattgttcgattcctacctatgagtgagaacattcggtgtttggttttctgtccttgtgatagtttcatcagaagctttctcatacaattcacctttatctcggctgcctgctccagctttgcggctcttgccattcccaggcttacagctgcattccctggcctacaagcctggctctcccttatggggtcagcagttttactctctgcctctgggcacaagccatgccgaaccacatgtacagcgtcagcagggcagttataccttttacagacaatagtggctctgagccacttacacaaacagattacataacaagtggagttatgcgcctgcgcgccagactccctgagtcacgctggccctgatgtttgcctctgcctgttttgtttttgtttttgtttttgttttttgagacggagtttcgctctgtcgcccaggctggagtgcaatggtgcaatctcggcttactgtaacctccgcctcccaggttcaagcgattctcctgcctcagcctcccgagccaccacacccagctattttttttttttttttgtatttatagtagagatggggtttcaccatgttggccaggctggtctcaaacacctgacctctggtgatccacccgcctcagcctcccaaagtgttaggattgcaggcgtgagccaccgcacctggctaacctattcttgaccaaagcacatccatgtaccttacacccacttaccttcccatcaagaacactcaacgatgtccctttccctacactctcgccagtattggatattttcacactctattttcttttcaatctgatagaagaaaataatatcttataattttcagaatttgcattcctttatttgccattttagtttttttcctgtgaactatccatttgcccattttgccattgagcttttaatctatcttactgagttcctccgagtgctttgtaaattaagaaaataagctctctgtcaaattgcctgcaacatttccttcatagcttgtcattttttaaaaaactttcaaaggtgttttcacccagtgatgtttcatcttttttctgaggtcagatttctcaatcatttgctttataaagtttgagttttccttaggatgctccatttcaagagtctaataaattcacccattattctaaaacttttgtaaatttcattttatattttcagtttattctaaaacttgcagttttcagtttattctaaaacttttaaatagtctaagactttagaaagatttcagtttattctaaaacttgtgtagtttcttcgtatttaaatctttgatccatttgaaactattttggcttacagagtgcggtatgaacagaacttgagtttgtataagacttagccagctgtctctacatcactgattgagtaacccctcgtgtcccatgcatagtcctaggcgccactgtgctggatcagaagcgaagggagaaggttaagtgactcactcagtatttgaccacaacactgcttagctcaaaagtccaccttgctgcccccttttagttaaaatgagcctgttagtgagacccttgatttttttagctttttttatttttagtttttctgggtcatagtaggtgtatatatttatgaggtgcctcgggagcattctggaccatcacagacgctttgggtaactcttacattggagggtaagcccatccccttcttaatcaatacggaggctacccactccacattaccttcttttcgagggcctgtttcccttgcctccataactgttgtggctattgacgaccaggcttctaaacctcttaaagctccccaactctggtgccaacttggacaacattcttttatgcactcctttttagttatccccacctgcccagttcccttattaggtgaggcattttaactaaattgtctgcttccctgactattcctgggctatagccacacctcattgctgcccttttccccagtttaaatcctccttcgcatcatccccttgtgtctccctaccttaatccacaagtataggacacctctactccctccttggtgaccgatcatgcaccccttaccattccattaaaacctaatcacccttaccccgctcaacaccagtatcccatcccacagcacactttaaaaggattaaagcctgttatcactggcctgctacagcatggccttctaaagcctataaactctccttgcaattcctccattttacctgtccaaaacccggaaaagtcttacaggttagttcaggatctgcaccttatcaaccaaattgtcttgcctatccacaccgtgatgccaaacccatatactctcctatcctcaatacctccctccacaacccattattctgttctagataaatgtagctgaccccatagatcctaaatcctttccccactcctctttccattccttaaaaaactcatcccaacccttttcattacacacagctgaagtacaggactgtgtggtcggaattcttacacaagagctggaaccacgccctgtagtctttctgtccaaacaacttgaccttactgttttagcctagccctcatgtctgcgtgcagcggctgccactgctttaatattttagaggccctcaaaatcacaaactatgctcaactcactccgtacagttctcataacttccaaaatctattttcttcctcccacctgatgcatatactttctgccctccggctcctttggctatactcactctttgttgagtctcccacagttaccattgttcctggcccagacttcaatccagcctcccacattattctggataccacacctgacccccatgactctatctctctgatccacctgacatttattccatttccccatctttccttctttcctattcctcaccctgatcacacttggtttattgatggcagttccaccaggcctaatcaccactcatcagcaaaggcaggctatgctatagtatcttccacatctatcattgaggctactgctctgccctgctccactccctctcagcaaggcgaactcattgccttaactcaggccctcactcttgcaaagggactacgcgtcaatatttatactgactctaaatatgccttccatatcctgcaccaccatgctgttacatgggcagaaagaaatttcctcactacacaagagtcctccattattaatgtgtccttaataaaacctcttcttaaagctgctttactttcaaaggaagctggagtcattcgctgcaagggccatcaaaaggcatcagatcccattgctcagggcaactcttatgctgataaggtagctaaagaggcagctagttttccaacttctgtccctgatggccagtttttctcctcattggtcactcctatttactgtcccactgaagtttccacctatcaatccctctccactcaaggcagatggtttttagacaaaaaaaaaatctccttcaagcctcactagcccattctattcctgtcgtcatttcataacctcttccatgtaggttacaagccattagcccgcctcttaaaaactctcatttcctttccattgtgaaaatctatccccaatccaccactcttgactccctcttggagtgggtagatgatctttgctgacaggacacactccaatactctcacccttatgaagtcctgttctttacttttatactcactcttattcttgttcccgttcttatgccaccctctctacctcttcgcagctatctccaccacactatcaatctcactcactctctcctagctgtttctaatccttctttaacaaacaattgctggctttacatttctctttcctccaaaatcaatgaggccccgacttactcactgctaaaaaaagggggactctgtatatttttaaatgaacagtgttgtttttacctaaatcagtctggcctggtatatgacaacataaaaaaactcaaggatagagcccaaaaactcactaaccaagcaaataattgcgttgatcccccttggacactgtctaattggatgtcctgggtactcccaattcttagttctttaatacctatttttctccttcttttattcggaccttgtgtcttccatttagcttctcaattcatacaaaacacatacagtccatcaccaatcattctgtgcaacaaatcctacttctaacaaccccacaatatcaccccttaccccaaaatctttcttcagtttaatctctcccactctaggttcccatgctgcccctaatcccactctaagcatccctgagaaacatcgcccattatctctccatactaccccccaaaattttcgccaccccaacacttcaccactattttgttttgtttttcttattaatataagaagacaggaatgtcaggcctctgagcccaagctaagccatcatgtcccctgtgacctgcacatatacatccagatggcctgaagcaactgaagatccacaaaagaagtgaaaatagccttaactgatgacattccaccattgtgatttgttcctgccccaccctaactgatacgctatattctcccctgcccttaagaaggtactttgtaatattctccccgcccttgagaatgtactttttatgcctatcccaaacctgtaagaactaatgataatcccaccaccctttgctgactcattttttggactcagcctgcctgcatccagatgaaataaacaaccttgttgctcacacaaagcctgtttggtggtctcttcacatggacgtgtgtgacaatctcattgagttttgagttgcatttctctgatgatcaatgatgttgagcacgttttcatatacctgtttgccttttgtagatcttctttgaaagatgtctatcagatcttttgcccattttttaattagattattatattttttcctactgtgttatttgggctccttacatattctggttattaatcccttgtcaaatgggtgtttgcaaatattttctcccattctgtggattgttgcttcattttggtgattgtttcttttgctgtacagaagctttttaacttgatgtgatcccatttgcccatttttgcttaggttgcctgtgcttgtggagtattactcaagaaatattttccaagtccaatgttctggagaatttcctcagtattttcttttagtagtttcacagtttgagatcttagatttaagtatttaatccccacccccttttttttgtgagacaaggtctggctttatcgccctgtctgcagtacagtaccatgatctcagttcactgcaacctctatctcccaggctcaagccatcctcccacctcagtctccccagttcctgggactacaggcacatacaccatgcccagctgttttttggggttttttttgtttgtttgttttagatggggttttgccatgttgtccaggctggccttgaactcatgagttcaggtgatctgcctgccttggcctcctaaagtgttgggattacaggcatgagccaccacacccggcctctttaatccattttgtatatggtgaaaaacagaagggtctggtttcattcttctgcatatggatataccattttcccagcatgatttactgaggagactgtcctttccccagtgaatgttcttggcacttttgtcaaaaatgagcttagtgtagatatgtagatttattcttgggttcttcattctgttccattgttctatgtgtgttttcatgccagtaccatgctgttgtggttaccatatctctgtagtataatttgaagtcaggtaatgtgatttctccagttttgttctttttgctctggttgacttttgctattctgggtattttgtggttccatataaacattagaattatttattctatttctgtgaaaaatgtctaatatttttataggaattgcattgaatctgtagattactttgggtagtatggacattttagcgatgttggttctttcaatgcattaacatggaatatctttccatttttttgtatcctcttcaatttcttgcatcagtgctttagagttttcattgtagagatcgttcacttcttcacatttattcctaggtattttattttatttatagctattgtaaatgagattactttcttgatttctttttcaggttgttcattgttggcatacagaaatgcaaatgatttttgtgtgttgattttgtgtcctgcaactttactgaatgtgttgatcagttctaatagctttttggtggagttttaggtttttccaaatataagatcatatctgcaaacaaggataatttgacgtcttcctttccaattcagatgcctttatttatttatcttgtccaattgctctagctaggacttccagtactatgttgaataacagtggtaaaagtgagcatccttgtcttgttccagatcttagagtaaaggatttcaatttttgcccattctgtatgatactaactgtgggtctgtcatatatggcttttattatgttgaggtatcttccttctatacccagttttttgagggtttttctaaatcatgaagggatgtggaattttatcaaatacctcttcagcatcaatggaaatgattgtgtggcttttgtccttcactctgttgatatgatgtatcacactgatttgcatatgctgaatcatacttgcatccttgggataaatcccacttggttatgataaatgatgttttcaatgtgttgttgaatttgttttgctaacattttgctgagaatttttgcatcagtattcatcacagatgttggcctgtacttttggttttttttttttttttttttttttttgatatgactttgtctggtttgggtgtcagggtaatactggccttgttgaatgagtttggaagtattccctcatcctctattttccagaatagtttgagtaggattggtattagttctttaaatgtttggtaaaattcaacagggaagccattgagtcccaggcttttctttgctcagagactttttgtcatggcatcctgttacttgttactggtctattaaggttttggatttcttcatggttcaatcttggtagattgtatgtgtttaggaatgtatccacttctaggttttccaatttattggcatatagctgctcatagtagcctctaatgatccttttaatttgttgatatcaattgtaatgtctcctttttcatctctgactttatttatttgggtcttctctatttttttcttttttagtcaggctaaagacttgccaattttgtttatcttttcaacaaaatgacttttagtttcattgatcttttgtatttccttcatttccatttcatttattttagtttcattgatcttttgcatttgcattttcttcatttcaatttcatttatttctgccctgatctttattatttctttatttctactaattttgggtttgcttcactcttgcatttctagttctttaagatgcatcattaggttgtttatttgaggtttttctactttttttgatgtagatactcaatactgctttcactgtatcccatagattttattgtgttgtgtttccattttcatttgtttcaagaaatttttaaatttccttcttactttttttcattaacccactagttattcaggggcatattgtttaatttccatgttttgtatagttttcaaaattcttcttgttattgatttctagttttattctttgtggtcactgaagacacttgatatgatttcaattattttgaatatttcaagacctgttttgtggcctaacatatggtctatccttgagaatgatccatgtgctgaggagaagactgtgtatctgcagctgctgaatgaaatgttcttttaaatatctattaggtccatttggtctatagtacagattaagtccaacgtttctttgttgattttctgtctggatgcactgtccaatgctgaaagtgtagtgtagaagtctccagcaattattgtattgaggatatattattttagctataaagatatttgcaatatatatctgagtgctccactgttgggtgcatatatacttacaattgctatatcctcttgttgaattgatttctttattattatataatgttcttctttgtctctttttatagttttgtcttaaaatctatgtaatgtgatataagtatagctattcatactcttttttggtttccatttgcatgaaatatctttttcgattcctttaattcacctatttatgtctttataggtgaagtgtgtttcttgtaggcaacagatcttgggtctagtttttctttttaatccattcagctgctccatgtcttttgactgaagtgtttagtccatttacattcaatgttattattgataactaaagactactcctgcccttttgttacttgtttactggttgttttctggccttctcttccttccttctttcttttcttcttgtcttctttttactgaagctgattttgtctggtgatatgtattaatttcttactttttattttttgtgtatctgttgtatgtgtatgtttttgagttgatattaccatgaggcttggaaataatatcttataactcattattttaagctgatgacaacttaacactgattgtaataacaagctaacaaacaagcaaatataaggctaatagaaaaaaactctacacttgaacttcatccccccactttttaattttttgttgtttctattgataccttattatactctcaatgtcttaaatgttgctttaggctgggtgcggtggctcacaccagtaatctcagcacttttggaagccaaggtgggcagatcactggagcccaagagttcaagaccagcctgggcaacatggcaaaaacttgtccctcctaaaaatacaaaaaatagccgggtgtagtggtgtgcacctgtagtcccagctactcaggaggctgaggtgggaggatcacttgagccagggaggcagaagttgcagtgagccaaggtcatgtcactacactccaggcctggacaacaaagtaagaccccatctcaaaaaaaaaaagcatagttattattttttatatattttataggttcttcttttagtctttctactcaagatataagtgatttacacacaatttcaggggttagaatctgtttttctgtgtacttactattaatagtgagatttgtaccttcagatgatttcttactgctcattaacatccttttctttaagattgaagaactccctttagcctttagcacttctttctttttttatttttatttatttatttgttttaagatggagagtctcactctgtcacccaggctggagtgcatggcacaatctcagctcactgcaaactctgcctcccgggttcaagtgattctcgagcctcagcctcccaagtagctgggattacagtcatgcaccaccatgccctgctaattgttgtatttttagtggagacaggtttcaccatgttgtccaggttggtctcaaactcctgacctcaagtccctttagcatttcttataggacaggtctagtgttgataaaattgctcaacttttgtttgtctgagaaagtatttctccttcatgtttgaagggtattttcactagatatactattctacgataaaagttttttccttcaacacttaaataccactctctcccagcctgtaagatttccctcaagaagcctactgccagaagttttggagctcccttttatgttacttatttctcttctctttctgtttttaggacccttttttttatccttgacttttgggagtttttttattaagtgtcttgagatagtcttatttgggttaaatctgcttggtttctggaaccttctggtatttgaacactgatatctttatctaggtttgggaagttctctgtaattatcccgttgataaaactttctatcctgatctgtctctaccttctcttaaggccagtaacgcttagatttgcccttttgagactattttctagatcttataggcatgtttcattctttctcattctttttcttttgtctcctctgactctgtattttcaaataacctgtcttcaagctcagtaattctttctttggcttggtcaattctgctgttaggagattctgatgcattctttggtgtgtctatttcatttttcagctctggaatttctgcttaattcttttttattattttgatctcttcattaaatttatgtgataggattctgaattccttctctgagttatcttggatttcactgagcttcctcaaaacagctattttgaattctctgtctgaaaggtccctgtttctccaggattggtccctggtgccttatttggttgtttgctgaggacatgttttcctgaattgtctgactggccctgtggcctgagtcacatttcagctgaagtcccaggctgctgccaacacctccatggcctggcagtcttccactggagttcaagttacactgctcaccagagaatcacacgcattcagtgtgtggactccatcctcacaatcagatgctcagtgtccaaaatgctgggtaagaaacatcctgaagaacacaaatctgagatacagcctcttccaggcctgctccaaggctccagaccaatgcatgaagcacagcctgagtccacgtgcctgagggaacagacctccaaagcctacattgggagcttccacctggcaaggaaggtgtgctaagggcagagcttccggcctccctgttatctcaaatgtggacctatcactggggccctagtactgggcccaatacttgcctccaccctttgtcaatgcgaacatccttcctcctggggacagagatttagaggttgactttagaaaaagccactctctatagatattttgaagcagcaagtccccccagcttcaaattttgtgctggctgaggcagcccagcctggttggtgactagaatggcctgaactgggagtcatggaaactgactcagagtcatggaaagttggggctgaaaggggaagaagaggtcatgcaccatccgtcttgcagctataaaaactaaggtttaggttggtgagggggtgtacccgaaggatgactcaaagggtacttcacgggtaaaggaactcagctcaaataaggtgactcaagtctatttacagccttgtccagtgtggactcaagaatagcctggcctaccaccctgagctgtcagggaggacagatgagatggacattgtgaaaatggggtactgccagcctttaaaatgcggcgagtgcacaagtcacgcagtgctgttatcaactcatgatataagttcctcttccctcccccgactgcctgtgttgagtctcaaattcatcccactgcagggaggtcagaaaaagttcagaacttctttctgacctccctcttgtgggatttaatgaggacatgaagtggtgacattgaggtgggagttaaggagaatgtgctgggcttggggcccagcagatggacatatgttacctgtgcccctggggatgattctaccttctaaaatgggccatggaaacctggtttcatgtggttgggtcaatccccccagtgcttctgaggttgatgagttaaacgatgcaaaggccatggttgggagatctcctcttgggatacgactttggtgaatttacctgggtctggtcctcattcctgcaaatctagaacccgaccaccatccagacaagaagagagactgagaccctacaataactcaagtgatttattttggggacactcctttccaggaagctgaatgcttgtgaccctcatctgtttttctgatttcagctgcctgggaggttgcctgagcaggcaggaggcagctcatgggcatggacttgaactgatgcctcgaatggcctgcctggcctttgtctttctttatgttccattaccaaatattctgctcctggaatcacagcctttgtttttatttatttatttatttatttatttatttattattttaaatgttttatagagatggggggtcttgccagtacaggctggtctcaaattcctgggctcaagcaaacatcctgcctcagcctcccaaaatgctgggattacacaacaatgccctaaaataagactttcaggtgaagcttatgcatgtctttcctgcttggtgagtagggtatgattagagttggatttttccatcccatattcactctacagaatcaatttagtgttctgcttatctatgggacattgatgtcatgtgatgggtgatgtcatgtgatgggtgatgtcatgtgatgggtgatgtcatgtgatgtgtgatgtcatgtgatgggtgatgtcatgtgatgcatgatgtcatgtgatgggtgatgtcatgtgatgggtgatgccatgtgatgggttatgtcatgtgatgggtgatgccatgtgacaggtggtcatgtgacaaggtgatcctgtgatgagtggtcatgtgatgggtgatgtcatgtgatgggtgatgggatgggcgatgtcatgtgatgggtgatcatgtgacaggtgatgtcatgtgatgggtggtcatgtgatgggtgatatgtaatgggtgatgtcatgtgggggtggtcatgtgataggtgatgtcatgtgatcgacgatcatgtgatgggtgatgtcatgtgatgggtgatgtcatgtgatgggtgatcatgtgacaagtgatcatgtgatgggtgatgtcatatcatgggtgatgtcatgtgacaggtgatcatgtgacaggtgatcatgtgatgggtgatgtcatgtgatgggtgatgccatgtgacatgtggtcatgtgacaggtgatgtcatgtgatgggtgatcatgtgatgagtgatgtcatgtgatgggtgatgtcatgtgataggtgatcatgtgatgagtgatgtcatgtgacagggatgtcatgtgatgggtgatcatgtgatgggtgctgtcatgtaatgggtggtcatgtgatgggtgatgtcatgtgatgggtgatgtgatgggcaatcatgtgatgggtgatgtgatggtgatcatgtgacaggtgatgtcatgtgatgggtggtcatgtgatgggtgatatcatgtaatgggtgatgtcatgcgggggtggtcatgtgataggtgatgtcatgtgatgggtgatcatgtgatgggtgatgtcacgtgatgggtgatatcacatgatgggcgacatcacgtgatgggcgatcatatgatgggtgatgtcatgtgatgggcaatatcacgtgatgggcgacatcacgtgatgggcaatcatgtgatgggtgatgtcacatcatgggtgatcatgtgatgggtgattgatgtcatatgattccagggggagcacctgttcaccaagcaggggagaggctgtgagttctctgccacgctggtaacacaatctctactggggcttcctagtgctgactgctgcaggtggctcatcatagcacaccaagggccaccacagggacacattaccaaaggaaaccccagaagacacaaaacatccccttcttcctccataaacttgggagccagatgttgggtgacatcgttcaccatctctggctgctctggccttgctggaaccccctgttttctctttctcctcttgcatcatgataaatggccgatcattaatggatgaaaagtggtgtctctgacacaaaggctcaacgaggcgtctctgtcaaagggtcacactagattctatatccacacacaggagacctctggactggggaccctgagcagtgccttggagaattctgcagcttcctgctctcaggcctgtggccccatctctccttgattgatgcccccaaggatgccctgaggttagaacactccctccgtgggtgtgttcttgaggccacccaaagtggggagctgtgtctgagactccacttacggccagaatactcaaaggcgttatctcccaggtaaaatggtggaccagaaactacctgcttgtgagtaagtaaggaaggagagccaaggtaaagccattagcatttgcagaccagttgttccctgacaaacatagatttagaacagaaattggcagctaaataaagtttagtacttgtattactcagggttctctagagggacagaactaataggagatatatatatatatatgaaggggagtttattaggaaaatgaactcacacaatcacaaggtaaagtcccacaataggctgtttgcaagctgaggagccaggaagccagtccaagtaccaaaacctcaaaggtacggaagctgacagagcaaccttcagtctgtagctgaaagcccaagagcccctggcaaatcactggtgtaagtccaagagtccagaagctgaagaacttggagtccgatgttcaagggcaggaagcatttaccatgggagaaaggtggaggctggaagacttagccaatctagtctttcatgttcttctgcctacttttattctggccacactggcagctgattggatggtgcccacccggattgagggtgggtctgcctttcccattccactgactcaaacgttaatctcctttgacaataccctcacagacacacccaggaacaatactttgcatccttcaatctgatcaagttgacattcagtattaaccatcaaagtactttttttttttttggccagtggtacagttgcctgggttagtactgagacaaaaggatgatggtgggggatgctggcttgcacaggacttcagctgtgaggagcctgtgtcctcgcggaggcttctgtttgcagaaagaaagttgccatggccctggaggagatggagctgagaagctgaggagggggagaaagggtcaagttcctgatgctgcagcccacagagacccctccaacctgcctcaggagagggtgtgagggcaggagcttgttgtgttcacaaagatggaggcacagtggtctagaaagacccaggaggaggctcagaatggagcggggtccagcaagacttctgcaacaggcgtttttgtctcctcctacccaactccactccaggatggagccatcaccaggtctggccatccacccttccaaatgtgaatcaggggaggatagtcccagctggaagctggtcccaatcaccttgtcagtaattaagctaggggtggtcaccagagtctgaagcagccaatgagacattgaggggatgtgatgggggtggggactctgggaaacttctgggatcagtggtctggttttcttcctcagaagtccttgtgtctggtgtctgggctgatctctctctgctgcctacttcagagatctctctctgctgccttaggatgaagacagttctgaggccatgaccacagagcaagaaggaacttgtatcaaccaattccaaggacaccaccaaggccaaacaaacaaaccaaaagccccaaatcagcaattaacagtgaaacaagagaggaagcagtggctgccatgatcagtggctgaccttacagagaggctagtatttaggggatgaactgcagggcttgggggagcaataggcttagaccacccaaaatgggcgctgtgtctgagactccacttaacgatcagaatactcaaaggcactacctcccagataaaatcttggactagaaactacctacttgcgagtaagggaaatgattttttaaaaaaatagtaataattgaaaaactggaaattcatatgcaaaagaatgacactggagccttccctaataacatagacaaaaattaactcaaatggatcaaagacctaaatgtaggatctaaaaccataaaactcttagaagaaaacacaaggcaaaagtttcacagcattggatttgccagtgatttcatagacatgatgctgaggggacaggcaacaacaacaacaacacagacaaatggaacttcatgaaaatttaaattatgtgtttttgactcatatctttttttttttaagagatgggggttttgctatgctgcccaggctgaaatgcagtggctatttactggcatgatcatggcgcaccacagcctcaaactcctgagtccaagtgatcctctcacctctgcctcctgagtagccaggattacaggtgcaaaccaccatgtctggctaaaatttcaaaatttgtgcaccaaatgacaatatcaacagagtaaaaaggcaactcacacaatgggataaaatatttgcaaattacatatctgataaggaattatatcccaaatatagacagaactcctaaaacaataaaaaaaaaaaaggcccgattaaatgggcaaaggacttgacatttctccagaagaaatctacaaatagccaataaatacatgaaaagatgctcaacaccactcattatcaggaaaatgcaaatcaaaaccacaatgggatatcacttcacacctgttagaatagccattgtgtgtgtgtatatatgtgtgtataaaaacatgtataaaacaacagaaacaacaaatgctggtgagaatgtgtatatatatatgtatagaaacaacatgtataaaacaacagaaaacaacaaatgctggtgagaatgtggagacactagaacccttgtgcactattggtggggaggtaaaatggtgtagctgctattatgggaaatagtattgaggttactcaaaaaattaaaaatagaactatcatatgatccagaagtcccacttctgggtatttatccagaaaaactgaaaacaggattgcaaagtgctatctgcatgcctatgttcattggaagcagcattattcacaataaccaagagatggaaacagcctaaacgtccatcaatggatgaatggataaagaaagtgtgatatgtacatacaatgtgatgcggtttggctctgtgtccccacccaaatctcatcgtgtagctcccataattcccacatgttgtaggagggacctggtgggagatgactgaatcatgagggcagggcttccccgtgctgttctggtggtagtgaatgggtctcatgagatctgatggttttataaacgggagtctccctgcagaagctctctctctttgcctgctgccatccatgtaagatgtgacttgctcctccttgccttccaccatgattgtaaggcctccccagccatgtggaactgtaagtccaataaacctctttcttttgtaaattgcccagtcttgggtatgtgtttatcggcagtgtgaaaacaggctaatacacaatggaataatattttagtgggggatgagaacaaaatattttatagtgtgcttgaaagtaggctgagaacacagttttttcttctatttattttcttttaaaaattattactatttttaattgacacataatcagacatttatggggcacattgtgatattttgatacatgtatataatgtgtaatgatcaaataagggtaatcagcatatccatcacctcacttttgtgttggaaacattcaaaatctactcttctagctatttgaaaatatacaataagttgttgacaattatagacatcccctagtgctatagcacacgaggatttattctgcctatgcagctgtacttttgtatctgttaacaaatctctggctatcccctaacccccaacacactgccccacctctaataaccactgttctattctctatgtcttgagatcaacttgagaacatgcagtatttctctttctgggcctgacttatttcattcacataacgtcctccaagctcatccatgttgccacaaatgatagaattttgttcttttttttttttttaaacggtgtcttgctctgtcgccaggctgaagtgcagtggcaggatcttggctcactgcaacctccacctcctgggttcaagcgattctcctgcctcagcctcctgagtagctgggactacaggcacacactaacaggcccagctaatttttgcatttttagtagagacagggtttcaccatgttggccaggatggtcttgatctcttgatctcgtgatccgcctgcctcggcctcccaaagtgctgggattacaggcgtgagccaccgcgcccagtcgaattttgttctttcttacatctaaacagtattccattatgtatatgtgccacgtattctttatcttacaatggaatataattttattcagccttaacaaagaaggaaatcctgccgtattcaacaacatggatgcatcttgaggacattatgctaactaaaataagacagtcacaggttaaaggctgcatggttctggttacatgaggtaactaaactagtcacactcatagaagcaaaaagtaaaatagtggcagccgggggctggtggaggagtgggagggagagttgctactcaatgggcatgatttagtcatgcaaggtgagaaagttctagaactctgctgtacaacaatgtgcatataattaatcatattttaccacacacctaagagtttgttaagagggcagatttcatgttaggtgttttttgtttgttcattttttaccacaatttttaaaaaggggaagaagaaggaacccatgtctgcctctctggtgagggcccttcccgctgctatctctttactgcccctagccagctgccctcggctctgaacttcctctgtggctatgcagttgttcagaagtaaaggcctgtgggaagggcctcatggggaaggaaaagctgtgcttttttcttaaaagagcaagatccacacctgcccactaactttttttttttttttgagacagagtttcgctctgtcctctgtcacccaggctgaagtgcaatggcaccatctcgtctcactgcaacctccacttcccgggttcaagtgatcctcctgcctcagcctcctgagtagctgggactacaggtgtacaccaccacacccagctaattgctgtatttttagtagagacagcagttttgccatgttggccaggctggtcttgaactcctgacctcaggtgatccacctgcctcagcctcccaaaggtctgggattacaggcgggagccaccatgcccggcctcactaacttttggttccattaagtgtgaaaatcagcatatgccgaatcctcatggtctgtggctatttaagggcatgacggctttggctccaagctcccaatggaaacatatttgctggaaaatgcaatgccagcactagtgactcatttattgacttccgtctttctccctaccccagagaatgggcgtattaggcaagccttgcttgtcagcttgtgttggaaccccaaggggtattcctagagatgtgtacaaggggtggtggtgtaagggcgtgcgcggtgggtggtagttgggcagacagacaatagatgcctactttactccagtggattctccttaacagagccacgagaataacaacccagccacactagctccagagagattgacggattcattgaatatcaacaggaagaaacggtgggaaaagaatgacatcacgttgacaagcgcccatgtcccctcgcccctgagtccagctggtgaagcaccatgctttggctttccctcccgcggagcggtgccgtcctccctgggtctggtcggatcttcgggaagctggatccaggaaagcattccaggaggtagggccctggggctggtggactgtgggtcttggtccctcacagaatgactcaggggatcttagccgggctcgaactctcctctctggccattatggaattttcaggcccatcattggccagagacctaaattcagttcaaagtcagagaaagtttctctttggctgaaggacaagaagaggggaggctctgggtgccatgctagggaccagagggtcccctctcctttatccactgctgacagtcagtactccctattagaaccaagagcaggttggaggcgtcctcatgggtgttcaaagggcaacatgccgaacatgtgtggtgtgtttgcttgtgggcaggtgggggcgggagcacatctcacatgggaaggtccctttggtgtgagggtccctcaaccatacagcacaaagtgaccacattcaagggcctcatcgccgtgggtgaagcctgtgaggagacagaaccacttccctaggacagttttcattagtaacatgatttcaacatcaccgaaaagggagggtgccatttcctgcgatggttttcgttactgccctccccacctggaggtggttcttgaggcctgacaggctcttttggggaggagacccaagctgtcatgctgaggaggctcccaagctgcagcccctcggaggtgggggaataggcagggagcttggggagctaggaggaggaagaggtgggagggggaggacaagcaccgggccgggccagggaggttcccattgcctcctcagccctgtggactcagagccatgtcctccctggggacagggtccatccagcccctcatgccctagaaccaggaactcatcccagaatcaccctccttgtgtgtgggatcagagaggtttcctatgaacataagtcattaaaacccaactttgctagaaaaaaaaaaatttaaaaacacggatatatcaggttctcaggcaaagacggtgttgagttggtctccggaatgatggaagtctagggctgggggggtctcccccaacctctttctgtactttggtcccatgctctgtgcccgagttattccagcagtggggacagagtcgtccagtgcttgagctccatctctacagctcctgaccaagagaacaggtgctggcaccccaggaggtgatggtggctcaggagaggacctggctaagtccctgagctgtgcagaacagggaggtgcccaccagctccaaggccagggcggaggcccagggcccctatctcagtcactgcatcccgaggactcgtagatgttccttccacagcccgagtctcttctggaaacgtggccagggcaggaaggctctgcagatccatctctctaagtggccatgtctttagtcagaggttcggagaagttcatgtagataggctgttcccctggctcctcagggaccctctgagaccccttcaaccagaggatggcagtgaccaagatgagcaagatgggcaccttcacaaataccaggagcatgtagtggttcctggggaaggggatgcagtggtcagagccctgggcatccccaggccatgtcactcccatcccctgaccctgtgagccaccagccaaagcctgtgaccctgggccgggcagccccactctgaagattcctgtaaacctcctccttggttcaacctcaaggggtcctccaacagtcaccttggctggttttgcacggggcccatcttcctttctaacatcaccttctgggaccctctttgcccaaagtacatctcagctcaacagaagcgccagaggtcaccaaatacaggttgtgtttcctgcctctgttcctgctaatgctagctccaggctggtaaatcacccttcctgttctgtgtcccttgatgtcttgcaccacagagggtggtatcttatctccccctggcacccattaggccaccaatgcaaggttgactgattgactgggagaatgatgctcactgagaagagttctgcagagcggttttctggtgagagctagagtggggagatggtggattgcagtgatgggggcaggagagagatggagggtgggcttggggccttgactctggctagaacaggtgctggcatttggtgacaggcaggagttcccaggcttggcttccccttaggagggaccccaggtaggggcaggagaaagaaccacatgactcacctcttgtgggagccgatgaacactgccatattgctgttggtaggtgagcttgctgttgtggaagccgctccctctagacacaggcaaagtcagccatgggttattagcacagttgggagctcatgcatgggtcacaaagccacgcgaccctgccagccctcaccagaagacccttttccctggagtaggaggatttttctctcctgctacagcccctcatgcttctactgagtcacttcaatctcaacacacagacatttttcctcatcatgttcagatgtggcaagaaaaattaaaaattaaacaggagtaaacactgtagtttattctgggagagagaggttttttcatactttctttccacctatcctgcaagtgggactattggatggggaaataaatttctggtcttttccactggagtggtgcctgagcagggcttaaggagagaagattctggaaatgggctgtccagaaattggggtagtccagaaaaagggaaaggggactccagaaggctcatgaagaaaagggcacactccagttaactagagaacatcgactatgagaaacggaacatttttaggagcaaccatataggcaatttgttgggggcagtctggtcaggggggccctgagcccagcccagcactgagtatccatgacccaacagtgatcttttatttcagtcctcggccccagcaaatttttctcaaaggtcccaggctgtccaggcacggtggttcacgcctgtaatcccagcactttggaagaccaagggaggcagatcgcttgaggccaggagtttgaaaccagcctgggcaacatggtgaaatcccatctctacaaaaaatacaaaatgaaccaggcgtggtcatgtgcccctgtagtcccagctactcaggaagctgaagtggaaggattgattgagcccaggaggtcgaggctgcagtgagtcaagttcaccccactgcactccagcctgggctacagactgaaaccctgtctcaaaaaacaaacaaaacaaaataaaacaaaacaaaacaaaaaagtcccaggctttggccacactaggtgggctcctgtctgagctgcaggtaattccaatcacaacagttcctatggagcccctgatcgttttacaggctggtacccctgtagatcccccacccaagactccggaacatctctctccctaaagctccacactggccactgttttttgtctctttgtaccgcctgcatgtcttgctcaatcccctctctgcccccatagatattctgggtttcccctacttggcagccctggggaagtcttgcttgaccctttctggactcctctttactcagctgcagccactgtgtccatgtgcctctttggtcccaaccccaacagtacacaggcttgttctaaagccggcattgtctatttccacatcaccaccaaatggacccgagtggacactgagctgatgaagtactgagtaggggtgtgcgggtggaagtgggggttgggggctgcttcccagactccagcaacagcagcaggatgaccccagagtctatcagtagagtccaaggcatggaggagaagccagggcacccagagtggtccctgacgttgcccgtgatggaagccatccttttgctttaaagcgtccactgtcacccatgcacctccctggggctttcttaccccgtgctcatcttacacagccagataaagtagcggagcaggtggctggggacctagagaggagggtgttgtaagacacccagagctactctgggttggtgcagttagtgggactcaatactaggaccccctgggcagctctaggttccttctctgccatgtcatgagcagggctgggccaccagtcaccaaagctgaggtccccattcccacccccatcccaagccccacctggattccttggagagacctcagggactgagatagcagagcgatgctggccaccactctcccttagtttctgtcacctccttcccagtcagtttgtctgcctgtctgtctgtctgtctctctctctctctctcttaggctcaccatcattccctttcagccttggaggggagcaggtaagagcactgactttcccagccctgagctccagggcctccttgtgtagatgagaaagttcttacctgggtcaacgatcactttcacttgagtcccaaggtcaggtcctcttctttcaatcccacaccagtaaacatctgcgtcatctcgcctgagcccctccatggtcacagtgaacgtgcggtctttctgattgtccttgatggacacacggtcactcttctctccttgctccgaccctctggtttcaatgaggatcttgcatgtatcccagcgcacccctcggcaccaccacttaatgtaggtctcccatccttgcttatagtggcattgaaccgtcagggacccctgctctggggctctcacagactctgggccttggatggagaaacagcctggaaaacagaatcccaagatacagctcattgcaccggcacgaacccctgctctggggctctcacggactctgggccttggatggagaaacagcctggaaaacaaaatcccaagatacagctcctgttgcctgagccagtttggtgtttaagagtcccgagtgtgtctctagcacacccgattcctcatccccatctccctctcagtccattcccccaccagcttctagacctgcttagcatgtgacaccatggtctcctaccaccttctttccttgtcctctcaatgctgttttcatcggagccaaatatttaacaaccagccctctgggggaaaaaatctctggtttaggagctgggcacggtggctcacacttgtaatcccagcactttgggaagccaaggtgggcagatcacctgaggtcaggagttcgagacctgcatggccaacatggtgaaacccagtctttactaaaaatacaaaaattagctgggcgtggtggcagtcacctgtagtctcagctatgcgggaggctgaagcatgaaaattgcttgaacccgggaggcggaggttgcagtgagctgagatcgcaccactgcactccagcctaggcaacagagtgagactcttgtctagaaaaagaaaaagaaaaaaaatctggttttaatatttgccaaattccatagtgtaaatactcccacggtggcagatgtcaggtaatccatgtgatgtcactggacacagagctgggaaaagatgtcccaagccagctcctgtgagccagccccagcacactgcgggggtacccagggttccctctccagccttcatcttgtctcacctgacaagcctccatggagggagtctctccatttccatggctttaatgattacctgtttcctgatgattcccaaatccatatttgcagctcagactccccttagctagcccaccatttacaaagacacactggatgtctccaccccagattccttcgttgcagaattgaatgcacttcctctcccaccctgaactactcttcttcagtatttttttctagtggagcaattggatgtggcaagagtaacaaaggcctggtgaaagctgaacaggttagaggtgagcataatcaaatggcagtccgtgcctccgctgattgactccagttaggctgtgtgtagataggctctttccttggcaatgacacgggtttcttgatcacgcagaagtggataaacaggcagagaatcacaggggaagcctctcttgactgtctcttggcctcagagcttcaggcccaggccaggggtctctgcagggtggagaaagccaggtctatttctccaggcagatgccgcctcctcacagcttgggccttctccttgaagctgtgttagttttcttgaactttgcattcgtggttggtagaataatgtcccccatagctgttggcatcctcatacacagaacctgcgaatatgtcccctgacatggccagagggactctgccgatgtgatgaagttaaggaccttgagacaggaagaatatcccgaataatctccatggatattctaagtgaaagagggttgagggagagtccaattggaagatggtctgttgctgctttgaagtggaagaagaggccaccggccaaggaaagcagatggcttctagaagctggaaaatgcagggaaacagattctcccctagaataggggttcccaaccccaggacaacagactagtaacagcccatggcctgttaggaaccggaccttacagcaggaggtgagcggtgggcaagcaagcgaagcttcatctgtatttacagccactccccgttgttcaaactaccacctgatctccgcctcccatcagaccagcggccgcattagattctcatagaagtgagaaccctattgtgaacttcgtgtgtgagggatctagattgcacacactttatgagactctaatgcctgatgatgtgtcactgtctcccatcacccccagatgggatcatctagttgcaggtaaacaagcttagggctcccactgattctacattatggtgcagtgtataatcatttcattatatattataatataatagtaatataaagtatacaataagtgtaatgcgtttgaatcatcccaaaccatcctcaccccactcctgatgtggaaaaattgtcttccacaaaaccggatcctggtgccaaaaaggttggggaccactgctctaaagaaacccaaccctacttgcacctcaattttaaccagtaagaccacgccaggctctggtcttcagaagcatcaatgagatgatgaaattgtgcagttctaagccatagagttcatgttaatttgttacagcagccactggaaattcacatggcattcaatcagcagaaccaacttgattctcttcaaaccagcagctccaccacccagccttcaggaagagcttggcatcttctttcatgctgtcctctccttcagcccccgagctgattggtagccagtttagtcagctctatcctagagatgctcctcagtttttttttttcttctttcagtctctgccatcgcaggccacaaggacagcatgacatcagagagagtgtgagctttgatgcagaaagacttgacactgaactagttgggaaaccctggcagagttgcttaacctctgcaagtatcgcttccttattcataagacagtcatgctacgctctactttgaaggtggtaataggacttggatgtgtgtaggctgggcaaggtggctcatgcctgtaattccaaagctgtgggaggctgaggcaggaggatcgcttgagcccaggagttccagactaacctgggcaacatggtgaaaccctgtgtctgcaaatgcaaaagattagccaggagtggtggtgcatgcctgtggtccccactgcttggggggctgaggtgggaggatcgcctgagcctgagagttcaaggctgcagtgagttataatcgcccaccactgcacttcagcctgggtgacagagtgagacactgtcttcaaaaaattatttatttttaaatttaaaagaagacttggatgtatgtccaacgccagacatttggggtttgctctgtcagtgacagctcatcaacaggtcagaacttcatctgtgcctggatcatggcagtggcatctggagaggtcttcccagccccagcagcatcctccccaactctcctctcctgaggattatggccttcataatcttgtcttttgtgtttccaacctcatatccaactcgccacccccaagatgtcctgcacactgacagctccctcagctttcctctccatactgctgcctgagttgggtactgagactgtctcctcctcctcatcagctgcacttgccctgagcatctaaaagtcttttcggggccgggcacggtggctcatgcctgtattcccgcactttgggaggccaaggtgggtggatcacctgaggtcaggagttcaagaccaacctcaccaacatggtgaaatcctgtctctactaaaattacaaaaattagccaggcatggtggcaggcaccttaatcccagcttcttgggagactgaggcagaagaatcactcgaacctgggaggcggaggttgcagtgagccaaggttgcaccactgcactccaacctgggtgacagagtgaaactccgtctcaaaaacaaaaaacaaaaacaaaaacaaaatacccaaaaacataaattggatttgtcagcaatcactaacagcagaaaagagatgctgctgcattgaacaaagtgtcatcaatcccagcttcagtcattcaaactgtaaatggctcacgatgtaattagtcccgtttaaaaaaatatttgggggtttctctaaccacagaatatgatggctggaactattaatcaggcttctatatgttgtcaagagttggtatgaggaacgatagagatggaaatgacagggcagccgtcagcttggagcagagccccgttgaacgggctgaagggtggaagtccagccaggactggagtcgggtctcagaactccccagccatgctctttcctgttgtccctccgtggactgctctatctgtgccagatggtcagtccctaggcaccagcagaaaactgtgtggcccacacacattgcacaccctgcgtaaaattctagattgtcccctaatgccctctaggtgtccaccaaggtttgccatggagaagatcatctagcccttcccactttccacctgggttcttgagaagttttttctttgaaagtctcagctcctgagcctggcgtggatggccttcataatcttgtcttttgtgtttccaacctcatatccaactcgccacctccaagacatcctgcacactgacagctccctctgcatgaatccaccattctttctaagcctccatctctctgcccaggtcccccaacacacacacacacacacacacacacacacacacacacacacccaactctctagagtgttctcctctcagctctgctccagagactgaccttccttctacaaggcacatcaagtgcacagcttcgtgagtctttctctagtcaccagagagaactgcttcatcctccgcacacgcctccaccaatgccttattgtgtcctgcaattgctcattgtttatgtgtatgtctcacccactaagccatctggagtctttttactttattttttttttgagacaaggtcccactgtatcacccaggctggagtgctgtggtgcgatcataactctgcagaattgaatacctgagctcaaaggatcctccagcttcagcctcccaagtagctgggactacaggcacggtcaccacgcccagctaatttttgttcattttatatagagacgaggtctcaccatgttgcccaaactggtcttaaacgcctggactcaagcaatcctcccaccttggcctcccaaagtgttaggattataggtgtgagccatggcctcaagcctggagtcttctttaatggccagttctcctcctcttttttcttgatgtcctcaggccccgaagcacacgatgtcagtccccagtgcacctttgtcgaatgacttcacaaagccacctctcatttccctggatgtggaaggacaaatgccctctgcctcctgccctgcccctgtcataccaagcgcccaaggccccagccccactcacctgagaggctgagaaggagcagagcagggggcagccacatggctctgccttcccggctcctcgtccgcctgatctgcaaccagtggcaaatgcagatcccagatgcactctggaagttctgcctgagctctggcttgcaccttctgcacatctagaccgcctttgactttcttactcattcacttccttttatagagtgggtagttcctgcttttaattattaaacgaaagaggtgtcattttttggcagggctgcgccacagggcttaagcatcgtcactatgtaaaaaagaggagggaggggactgtgcagggtctttagggtagggggagatacgtctgcagaaggggtggggtggggggcgtctggcctagcaggccttgggtccaaggggtataacactctgggagtcaatttcagagctgttctataccacagtgaacacccaactcagatgtcggatgggtcatgctgggcacacctgaacatgcatttgttcaggtgttatagccaagtgcataaacatgcagactgttgggtcagacagacctggctctaaccccacgagcaccacctacaagctgcgtgactgtggacaatgcaatcaacatctctgtgcctcagttattgtatctattaactgggctcataatgtttgttgttgttataggagttattaagaaattattttaggtagataggaaaaggggtgcttgggaagatttttttttcttttaaagcagctccataaatgtttcttgtctagaagaaaagccctggctcttagagctgggcaggcaagctttgatatgcaaatacaggccattagaaactgcgtccacccaaacatggagactcccgcctcttcttcttttccccacgttcctggcaacatggccgcccctacatacacccatgtgtgtagaacatcatggcgcctgtatttgcatattaaaaggctagggtaggaaggctagttttttcgtgggctacttgaatgacatacctggtcaaaccaatcccctgggccctatgcaaatcaggtaccgcctcctccagcctcctcatataactggctgttttccaccgtactcgaggttccctctttcagcttggagcccgcctccctcagtctcagaacagggggagcctcttccttccttctttcttgtctattaaattctccactccttaaaaccactccacgtgtgcccatgttgttttattcaaaccagtgggagaccaaggaccctagtgttcctccagtcatcagagccataccattttgttgcattggccgggaatccaaggtacgacactcatcggagtggtaagtatgggagtgagcttaaaatctcttctatcattccgaggcactcttagcctctattttaaaataaaataagtcaatgggcatccgtcagccgggtacatacacttagtgttggctgccatactgaagactcgaatgtgaggcttgctgctgagaacacggagaaccccccaacacccctgggtcattgggaatgttggccatgttttaaatcagcttcttttcacgggaagacctcgccattgtgcaaggctgggaaaagttctaaggcaactaacaatttctggccagagcacaccctggcatgattcaaaggcccctggactggacccagcctctggcggcccattctgggtgttggcaaagaatcctcaactatcttgtcacaaaactctccttccttctctatctgcggtctcttacactttctttgtgtgaaatgtgtagcgagttttacagcctaggaaagtaatcctgttaggcaaaatcaggaagatgcccttgcaatcttctaggaacagagttctcccctttctcccaccgtgaggttactcactaccacgtctctagtgagcacatagtatttctaagccaacagtgccacctagtagaaatagaaatcctctacataaagcatattttttcatggcaaaccgcagcttctttttgcatgattagaaatcaggctcggccaggcgcggtggctcatgcctgtaatcccagcactttgggaggccgaggcgggcagatcatgaggtcgggagatcgagaccatcctggctaacacagtgaaaccccgtctctactaaaaatacaaaaaaaaattagccaggcgtggtggcgggcgcctgtagtcccagctactcgggaggctgaggcaggagaatggcgtgaacccggcaggcagagcttgcagtgagccgagatcgcgccactgcactccagcctgggcaacagagcaagactcggtctcaaaaaaaagaaaagaaaagaaaaggaaagagagagagagagagaaagaaagaacaagaaaagaaaaaagaaaaagaaatcaggctctaggcctcttcttgaaatgggaaagttctgcctttagcagttaggagttaagaagtcttccatagccaaattttagtctcaatattgtcccattggcaggaaaatggccattcggttcctacattcctttaaggcacctattctgtctccgattaagatggtacttaattagtaaggggatttttaagtccagaagttaaccagaaccatttttctaagggtaaatgctttagcacaggccataataatagcaagatataaagttcaatctagcacgccccctcccttaaagaggctttgcccaattatgtagtttttctttttttttcttttcttttctttccttttttttttttttttttttttttttgagatggagtcttgctcttgccacccaggctggattgcagtggtatgatctcagctcactgcaacctccacctcccgggttcaagtgattctcctgcctcatcctcccaagttgctggaattacaggtgcccgctaccatgtgtggctaatttttgtatttttagtggagacagggtttcaccatgttggccaggctggtcttgaactcctgacctcaggtgatccacccaccttgccctcccaaagtgctagaattacagacataagtcaccacacctggcccgtagtttttcttaaaatcgttgtttttttgttttgttttttagggaagcacacaggtcacacaggaggtcaaaaagaaataaaagactaaggtgcttgtggaagtgtaagtgggcccagaagtctagtttctctggtgccatggcttggagggtcacgcctgcagtcatggccagcacatttaaatgggtgccaggatccaggaaccagggaaagaaaatagttgggggaacgccccctactgtgttctccatcctggatcacatactgaaaggaaggagactaaaataatgcttttattctcacttctctttctagatgggtaacagatcgtcttctctgcactccaacctgggtgacagaatgaggcttcatctaaaaaaattaatataatgaatcacattaatagaataaagaagaaaacccacataatcatgtaaacgcacaaaaaccactatctgaaatccattacttttcatgataaactaggaattaaaaggtgcctataagcaacccattacaacccatggcaaaatctttcctttagaatcaggaagaggacaagattgctcaaaatcactactttgattcaacactttgattagcctgcacaatacaacaagaaagagaaacaaaagacatgagaattagaaagaaaaacaaagctctaaattattctagattaattgattatctacatataaaactgaaaacaattactaagattttttgcagagttgctaaatatatataatcagtaaggatcaattgtttatctacatgcatgcaatgaataacttgaaaatgcaataaaagatgccacaaaatggggcggggcgcggtggctcatgcctgtaatcccagcactttgggaggctgaggcagatggatcacgaggtcatcagttcaagaccagcctgaccaacatggtgaaaccccgtcttcactaaaaatacaaaaaaattaactgggcatggtggcaggcacctgtaatcccagcaacttgggaggctgaggcaggagaatcacttgaaaccagaaggcggaggttgcagtgagccgagattgcaccactgcactctagcctgggcaataagagcaaaactctgtctcaaaaaaaaaaaaaaaaaaagccacaaaataagaataaaaacataaaatatccagaattacacttaacaaatatatgagcaaatatcaaggagaaaataatagaatgttattaaaagacattttaaaagctcataaataattagaattacataccatgttcatagacagagaaattattataaagataaatttcatacatttacatttaaagtctcaacataattttttttcttttttagtacgttgactggttaattctaaaatttctgcagaagaggaaatggccaatatttgcaaagacattcccaatatcaaagaacaatgtatagtgacatgacttaccagataacaagacatttaaatacagctatagtaattaaaacaatgttgtcttggttccaaaataagcaattaggcaaattcaacataatagagtggttagaaaaaggtccaagcagacatagaaataaacacctgccaggggttgcattgcagattgctgggaaaatgtggataatgcttatccaaatggaagacagaaaaatggattattatctcagcctagaaacaaaatcatttagaaatgggtcaaggacttacctgtgaaagggaatatttaaaaaattttagaagaagatataggataatttttttttaatttgggagtatccataattggttaagcaagatgaaagtataaaccattaaggaaaatgaataatttgtacattaaagtgaaaatcctgtttctcaaaagatatcataaagccaatagcccaggaaagtatatgtggagcaccagtaactaacaaaagacttgcaaagaacttctaccaattggatcatgaggtcaggagatcgagaccatcctggctaacatggtgaaaccccgtctctactaaaaattcaaaaaattagcaggacgtggtggtgggcgcctataatcccagctactcgggaggctgaggcaggagaatggcatgaacccaggaggcggagcttgcagtgagccgagatcacgccactgcactccagcctgggcaacagagcgagactccgtctcaaaaaaaaaaaaaaaaaaagaacacagacaaacaacagaaagtagatgaagattagaagaggcatttctcaaaagagaaaattcagataaccaaaaaacacatgagcatgagtttaacattagtaagcagagaaattcaaattaaaacaatgagataccatttcatacccattaacttgaacaaatttagaaagtctgataagattcaagcaggagcactgctgataagaagcaaaaattggtgcagttactttggaaaataatttgcgcttgcctagtagagctgattacacacatgcagcaaaacctagcaattattcccttagaactctactctaggagacacttttggacagacaaaattaggatatatgttcataataacgttataagtaatggcaacacaaaaagaagagaaggaagaaaaggaggaggaggaagagaaaaaagaagaggaggaggaccaagaggtaggaagagcaggaggaagaggaggaaaaaaagagggaggaaaagaaaaaagaagaaaaggaggaggaggaggagaagtaggcagaagagtaggcagaaaagagtagaaagaggagaaaggagggacaagaggaggaggaagaggaaggggaagacgagagagaaaggatagagaaagagaaggaggaaaataagaagagcacaaaaaagagaaagaaaagaaacaacctaaatgcctgtttaagaaagagggatgtgcgagttatggtatgctcatacaacagaatgtagaccaatacaaagaagtgacacatcagtgcgtcaacacatcaacatggatgaatctcaaaaataaagtgttgaatggtccaggcactgtggctcacacctgtaatcccagcactttcggaggctgaggcggatggatcacgaggtcaggagatggtaaaacccctctctactaaaaatacaaaaatttagccggacatggtggcacatgcctgtagtcccagctactcaggaggcagaggtgggagaatcgcttgaacctgggaggcagaggttacagtgagccgagatcgcaccactgcactccagcctgggtgaaagagtgagactccatctcaaaaaaaaaaaaaagtgttgaaagataaagtctgattgcttagaaataaaaatgcctaatactattcacagaaagttcaaaaataaacaaagctaaacaacataccctttggaaatccatatgcatgtatgtggcaaatcccttaaaacaagatgatgatgaacataacaatcggaatgtgagccaggtgctgtggtgcatgcctgtagtcccagctgctccagaggctgagacaggaccaaggcttgagcccaggagttcaaatccagcctgggtaacatagtaagacccatctctataaaaaaagatacaataaaataaaatgtaggatgtggttttctgagagaaggatagaaaagaaattgcataagatcagcaagcggtttggggcttcatgagtatgaatgatgttctattacttaaactggatggtgggcacacacaggttaaagagtattcttggtgtaaagtgcatgtattcttttgtgtgtctgatacatcacaagaaaaaagcctccaaatcttctgatagaaacatggatttgttggtcagaaggccattcccatatgtaagagggagtatgttgcttggcgcggtattgatgggcatcagagttactgtttctcacaatccagctgactctgcctccccaccgagcttctctgagccctgttcacccacaggacagcccccagcttgtttaggagcaggggaagctccaggaggatcaggagcaggatgtggagactgctgaggagggacctgtggggacacggtgacaggcagtgagttacctccccaggggaagacctggtgccctccaccttgcccctatctccagtgccaaggtactgtgggcacaaaaatcaagaactaacctggacatagcagccagatacataagaccaatggcctctaattatcaccctaagaattgccttgagattcagggctgtgggctgaggcagggcagggcgatagcagcaatgtgaggggacacccagggacctggtaggacctgaatccacaagaatctctaccaaagccctttgtgtgcaggagcagactcttcagaggtgcaggaatcaataacctggatatctgtcgaatgcctgctcctctccagatggcatttcccacaaaggcaggagccctgtctagtcctcttcacagataaactggcacctgccctgtggctgcaaacatctatctgtaaaatttatggttgttgagcggcggctgctagtgtctgtcctgggtccactgtgatggccaggtgcctcccagggaacagacatgttggacaggccttcccaggaggcgggaacccaggtctgtccacactcagaatggctggttctcctgacatgatgggctcagggtgtctttaccctggaaagggcaaggaggctagtcagatacaggatttgcctcctgtctgtcccggagggcatcaccccttctccaccttctcatgccttaagcatattccttgactctcccaaccctcttacagatttccgttcctttcttcctatcatgcccaatagcaccagaggccgagcggagagtgacaggggaatcttggtggacctggcaccatgaaggggtcactgcacccttgtcctgcccagccctcccttcatttacactctcagggacagtgtgcactgcagtcattggtgctgatgcccccgactcacatcatgggactgtcgccagcccaatgcaatcccgggccttcccacctgcccagtgttcaggtctgaccttgacccagcttggcagtagctggccctgccacggggacctgacctggtctccccttctgctcttactcatccctttcattctccccacaatgagcaatgtgacccctgacacacacacacggccctggggaggcactgctgaactcccaatggctcctgctgtcacaggatggcacccacctgacctggcctctgcacacaggtcctggcagcccctatcacccggcaagtggctccaacctcctggctccaggttcacctcggtgctgccaccctcccgactcgggtctttgtccagaccctcaacctcccactcctctgcctgcctccagctgacaggtttgcctgcgtgttccttgaccttcctgggttatggtggcttcctttttaggggtcctcatgacccatttcacatttccctcttgtgtttatcactgttttgttggtgggtttcgtctggactggtagctcatggagaaccagggcagtatcttgtcctgatcacagctgtgacttgctgtcatcctggggtctgccaagggcaagtcaacaaattgcttgttgaatgaatgaatgaatgcatgactctctcgagtcttacctgccttcagaaaacttaattgtctgatgctggtgtgccatatccagctcaggctggggaggagacagagaatgctatctgcaggccctggagccactggatccagagagggatctgcttcctgtgttttccagatccaagtctaagatgcccccctggcaggacacatgcacctgctgctctctctgcctcagggctcctcctccagggatcctggcgctcacccccctcctttctcctgatccctgcttgctcagcgcctattagaggggcttcatcacagacccctccactcctgcaaagcagtcaccccacttctcttattttactccgtggctcttttcacctctgtcttttacattacctctggaacatattcatgtatttttgcatttgtttatcatttctatcccccacctggaatatgggctcagtgtaaacagagctccttgcctgggtgttcacggctggactccaatgccaggtcagtgtctgatacaccaaaagctcccataagcatctgccgaatggaaaaaagggttaagaaccccccaggcgaggccctccttgaccaggaggactcatgggaatcatctgcctcacaggggtcttgggtgttggccaggtcatcatggcgaccctggaactgaaatggtgggcaaatgataacatctttcgtctgtatagacagacatggtctacactactgagcaaaagactcacttaactaccacatcaaggagtcatagccctccatccgtttccaaatttgcaccagttaaaacccacagccctggaatgaaggagaggtcaggtccccttgaagaaggaggaagggtaggcctggttatgctaccacagttcacactgagaatcttctaccagctctcccagagggacctaaagacactggccaggatgtgtctacctgaaggagggaatagtcaggctttgggggaaattctggatccttttctgcagggacccccattccgagaggcctaacatggggcttggtccactattctcagcaaaggcctgtggaaatcagggaacaatggatttctcactcaggtctgactgagtgggcctgatacatcccaaacctacacattgtcatttattaaagtttgaaagcatcattgaatcgacacactcagcaaatggaagcagccgcatattctacactcctggacccagggagtgtgggccattatggtggcaaaggtgcaggggagtcctagacctgcttctccctgtgaaaacggtggaggaagcagtgccaggctcctggagaaatggaagggtgcagggagggcatccgggcactcagaggtattgctgacggcccgaggcttagctggccggggcgtgcacatgagacgtggactcacagctcagggcgtccatgtccgtcaggttcacatgtgacacatgaggatcgggcacagggaaaaggctgaaggaggctcacaaaggattccaggagatgtggagagagcagcccgggagggagtggtcaggaggtcattccagtcccccagaggggctctgttgcagcacagggccttgatggacagcagatgctactggttctcacccttgggccaattctgcctgcttctagagcttctctgaggtctgttcacccagaggacggcacccagcatgctcaggagcaggggcagctccaagaggaccaggagcaggaagcggacattgctgaacagggagctgtggggacacggtgacaggcagtgagtcacctccccaggggaggcccaggtgccctccaccatcccctgacccttgtgtcccaatcctgtgaccacagccaaccacataagcacccccctggacagtccatcccgtctcagcatcacggcccctaaccctcagcctcggatttacccttgacctgaggactgtgacacaggaagggcaggaccatgagaggacgtgaggtcacgccagggatccaggcagggtctgtgtccaggacgcagctgtctacctctgtgctccccatggagggttacccagctggggtcccggaattcacaaagggttatttgtttggtgtcaactctcctgtacacagcgtttccaggagggcagggaccatttgtttcattcacagtgagtacctgctgcctacccggagtctccaataatctgccctacaacttcagtggttgttgaaggaattaatgaatggacagctcagctctcagctcctcagaggactgggcttatcaaacaggatgaaactctggccagggctgcgagagaggcaggggagaggaccagggccaccggaccccagagcatctgcccccttccctggcctggccaggtcccaaggctcctcgcaggacatttgcctcactcctccctccacctggacccttcttcctccagaccccagagtgcccagcccccaacccttgaggtctctgtgctcatgtcctctaattctcaaaccctcttctgatcatcgtcagtgaaatagcaactccaacacctgcacacgctctccccaaacccaagagtcaaacatctcatcccagcattcattaccctttgctgtatttgtacatcagcctctgtgctgacttgctcaatgcgtgaatccacgcagtagaactcaacttccaccagggcaggacagtggctgtgtggttccctgctgtgacccaatcccaaaaggagcgcctgacacttaatagaaccttcacgtttggtgtgggaggtgcgaacaaagaagggactggaagaagggacatccgagtcccctaaacatcacacgcagtggggaggccgccagcgtggcccagtcctatgcgcaggcaccttacccagggtgtgggctgggttcggggctgtcctttctggtcacgctgggccaggtgtgcacgggcagcttcgtgggaggacctgaggtgcccatggagctctgggggctggaggctgtggtcgtcccggctgtgggtgaaacacaggtcaaccttgatgacatcacatgggtctcccacttactctcacctgttctgctccaattttcacagacaaggtcaccaatgatgtgctggacagatgccctgcatccatcatgccccacggccacacccaggcctgaccagggtcctgggcctctccttgtcccatccctaggtactgcagagccaggacaccatttcagatgtgagagctgccctgctcacctgtggcaaaggtacgggtctccaggtttcaccccagccagggagggacagggtgacctgggggaatggggtgatgtttactctgcgaagggtgacccagagtgactgcgaagccagggccctgggcacagcagtggctggagagaggctggaagtgaggacaggaagtcagtggggtcctccctgaacgatgggacccgagtccactcagccccaaatggcagccatgctgcggccccacaaggccattggaccatcctctcagcaggagggaatgcccaggaagaaagatctagagaggggatgcccggtgaagcctgggcggcggcccgtggtgaatacagctggataagggccctttcctcctctccctggcgccctcaggtgggatcttagctcctcactcctagataggaaggcacaaagggcgcaggagggacacgtcgcccccggggaaatggagaacaagaagatgctccgaggaacctgggacattgtcagaagaaaacgatggaaaagcaaccacactgaggccactgggtttgtgtcttgtgagacaggagggggcctttgagggaagaatgatcttcggcacgggaaagggccctcaggtccgtgccagtctcagctcatttccatccacaggtccctttgcctgagggggcaatttctggggttccctcctgtggtaaaaggtgccagagaataagggggacacacaggtcagcctcaggggcaggatgtggttcccaggagcatgagaaccccacccagggctctggggctccttcctgtgtcctccagtggctgctgcaggagctcccaggacagggctgtgaggctgcggcctcaggaccctccagacagggcggcatccatgcaggccccagggcaggggcagccttgagtgagaggagccaatgatgggggggtccaattccccgtggggaagagcgagttagacccaggcgggacagtgggcacccttcagtatggatccggcccttgtcaatacagggaggtagcaaggaccccagagtcaggggtggcctcacagaccccacccaggaaagtttcaggcctgaggccgtgagggagggcccacagcggggggtctccagccacagggccagggtgcttttgtgggcgcccaccctcccaacacacacatgcaggtgcacacacacacaaaccacaccacaactcctatgcaggcacgcatacacaaagacgcactcacactcatccacacacagcggcacacagtgtcctgactcaccaacccccaggctcacaccctcctgttccacttctttcttcagggacagaatgaccagccctaggctcaggcaggcctggtgctgagaaaaggaggggctcacccgggaacacggacacctcaacctcgacaatgggatcatgaaagtctcggagccacggtgtatccaccccacaccagtaggtgcctgcgtcctcctctgtgagattctccagggtcactgtgaagctgaggtttgcaggactgtccctgatggacactcggccattccttttccctgctgaccctttggtctccacaatcttgtcacatcggagaatctgtggtggtctgcaccagaatttgttgagggtcctgtgttccttctcatagcgacactgcacactcagggatccccccacggggcccgccacggtcatggggtggctcagaggaaaatagcctgaaaaatacaagccaaaatcctgtctccttaccagaggggcctggtcaggggtgccgcagtgtcagcccctcatggaccctgggcgtgtggagaaggcaatggcaggcaggcagcctttgtccacccaggaacagggactgagggtgggaggctccctctgtgcagaggtgggaagggcatgggaagtttccatggagactggaaaggcaaggctagggaaacactgggtgtgtgcgggcctgtgtgtgcatgtgagtgtgactctgtgtgtgtgactgtgtgagtgtgactgtctgtgtgagtgtgactgtgtgtgactgtgtgtgcatgtgtgactgtgtgtgcatgtgagtgtgactgtgtgtgcatgtgtgactgtgtgcatgtgtgtgtgagactgtgtgagtgtgactgtgtgtgcatgtgtgtgagactgtgtgagtgtgaccgtgtgtgcgtgtgagtgtgactgtgtgtgtgatcgtcccagataaaatttgtgattggataactttggcaatgacagtcacagcatcacctcccaccagggcttcctgtctcgggcacagaggaataggcctcccccgtgctgtgccctgccgcctgctgtcccctggtgaggcagctgctgaccgctcctgggtgctcctttgccctcctcccctctccctgccccactcccctctatgaccgctactccagcgcctgcacccctccctgccctctcccactcaggacagagctccccaagtccagggtcggcccactcacctgggacaagcaggaggagcagagctgaagaccgccacgaggcccaggccctggcagtcattcctgtaacacgaatgtcacctgccactgtgcaagaccccaggaggggacaaaatgtaatctcctcccagcagatctgagcttcgcttctgcttttcttctgctctctgcttccttgtccagccctgtctcaggtctgaggctggagagggtcagggtacaggaagctcagggagagagccgcctgggctgaggccggtgctgacagctctgggatggtgctagtggctcctctcaaccctgacgtctggcaaagtccagggtcccttgggtggcgatgcagccacttccccacagcccacagcttctggcttcagtgtgttactcacactgcagaaggcagagccaagctgggccatttcctaccacatgggctgctccaccctctgtgacatgtcacttcctggtcaggatggacaatcttgtggttggaggctaaatctgccaccttctttagccttggaggtgaccagagagaggttgtgtcccttaatcttcagctaggtccccgcagagacctctgcccctaagacccccagctcttcttctggcctcagaagttagcgctatgaacccagacaccatctgcatgtccctttttggtgctgagtccccaaccaggttaaaatcccacaggcttggggagttttcctcttgtgcccctgcccccagacctacacacacagcggcatcacccacccgagaccctccttttccatcttgtcttcttgccaaaatccatgccccagtgggaatcagggcagagaactgagaatagagagagagttcagacatgtgaagatgctgaagtgggactttgtggaggatgtgaggctgcgactgagccagcacacaccccagggcacacggaggggtgtttggtgactgagaggacagtttgtcatgagcagcggctgctggtgtctatcctgggtccactgtgatggccaggggcctccgcagggagcagacatggcagacaggccttcccaggaggcgggaacccaggtctatccacactcggcatggctggttctcctgacgtgatgggctcagggtgtctttaccctggaaagggcaaggaggctagtcagacacaggatttacctcctgtctgtcctggagggcatcaccccttctccaccttctcatgccttaagcatattccttgactctcccaaccctcctacagatttctgttcctttcttcctatcagagtcaatagcaccagtatgtgcacacagccatgaggttgagtggagagtgatgggagtctgggcaaacctggcaccatgaaggggtctctgcaccctcgacctgccctgtcctccctccatttacactctcagggacacagcatgcactggggtcattggtgttgatgcccccagactcacatcatgggactatctctagcccagtgcaatcccagggcctccaattagcccagtgctcaggtctggcctgggcctggctttgaagtatcccggctctttcatgggctgacctggtctccccttctgctcatacccacccctttcattctccacagaatcagcaatgtgatccctgacacacacacatggccctggggaggcgctgctgaactcccaatggctcctgctgtcacaggatggcacccacctgacctggcctctgcacacaggtcctggcaggccccagcacctggtaggtgtctccagcctcctggatccaggttcacactggtgctgccaccctccccactcgggcctttgtccagaccctcaacctcccactcctctgcctggctccagccgacagggttgcctgcgtgttccttgaccttcccgggttatggtggctcgctttttaggggtcctcatgacccatttcacacttccctctcgtcttcctcagtctttctgttggcgagtcaatgtctgctcccatctagggtggccgccccttgagagcaggtgcagcctcttgtctcattcacagctgtgcccgttatcattccagagtctgccaagtgcagtttaacaaactggctgttgaaaggatgaatgggtgaatggatacatgacatcctgatgtcccactgcctcagaggacttagtcatccaaagttggtgcaccatttcctgcccaggctggggaggagacaggaaatgctgtctggaggccctgaagccacctgacccagggaggcatctgcccctggcaggacatgtgcacctgctcctctctctgcctcagggctcctcctccagggatcctggcgctcaccccctcctttctcctgatccctgcttgctcagcgcctattagaggggcttcaccacagtccccctcagctcctgcacagcagtcaccccacttctcttatttcattccgtgactcttttcatctctgacttttatatttcttctggaatttatgcacgtatttttgcatctgtttatcatttctatcccccgcctggaatatgagctcaatgaaaacagagctccttgcctgggtgttcacggctggactccaatgccaggtcagtgtctgatacaccagaagctcccataagtatctgctgaatgtaaaaataggtgaggacccccaggcgtgtccctccttgacctggtggactcatggggatcatctgcctcacaggggtcttgggtgtggcatccctggaaccgaaacgatggtcagctgataacgtcttcctttgtctggataagcagacatggtctgcactagtaagcaaaagactcagttaactaccacattaagaagtcacggccctcaaccaatttccatatttgagtcagttaaaagccacagccctggaatgaaggggaggtcaggtccccttgaggaaggaggaaggaaaggcctggctaccatgccacaactcacactgataatcttctaccagccctcccgcagggaccagaagacactggccaggatgtgtctacataaggaacggaattgtcaggttttggggggaatcctggatcctcttctgcagggaccccagtcctgagaggcccagcctggggcttagtccactattctgagcaaaggcctgtggagatcagggaacaatggagttttcacccaggtctgacttagtgggcatgataggtccagaatctatgtattgtcatttcttaaagttcgaaagcatcattgaattgacacactcagcaaatggaagcagccacatattctgcactcctggacccggggagtgtgggccattatggtggcaaaggtgcaggggagtcctggacctgctcctccctgtgaaaacgttgaaggaagcaatgccaagctcctggagaaatggaaaggtgcagagagggcatcaggcacttagaggtgttggtgacagctcgaggttcagctggccagggcgtgcacatgagacatggagtcacagctcagggcgtctgtgtccatcaggttcacgtgtgattcatggatcaggcacagggaaaaggctgaaggaggctcacagagaattccaggagatgtggagagagcagcccgggagggagtggtcaggaggtcattccagtcccgcaaaggggttctgtcgcagtgcagggccttgatggacagtagatgctactggttctcaccctctggccaactctgcctgcttccagagcttctctgaggtccgttcacccagacgacggcacccagcatgctcaggagcaggggcagctccaggaccaggagcaggacgtaggggctgctgaacagggagctgtggggacacggtgatggcagtgagtcatctccccaggggaagcccaggtgccctccaccttctgcctgtctgtgaacccaggtcctgtggccacacaaatccctgtgaggacaaactctgtatatgacaactcctctaaagagatcattagaccctgaccttcagcctgagagtccctggagtctcaggactgcctataaggaagcacgtggccgtgaaaatggtgcatgaggacagggagggatccaggtgagaaccacacccacaagatctctacatcccggggttattcactggcgcatggaatcagtcatgtagtttgatgcctgtatggccatcatttcccgagaaggtgaggactattcatgttattcacaagtaactggtacctgccctctggttgcaaatatcagcctgtaaaattcatggttgttgaaggaatggaaggaatgaatgaatggcccagctcagctctcagctcctcagaggactgggctcatcaaacaggatgagactcgggccagggctgcaagggaggccaggggagagggccggggtcaccgggcaccaaaacatctgccccctgccctggcctggccgggtcccaggactcccttgcaggacatttgcctcactcctccctctgcctggacccctcttcccccagaccccagagcgccctgctcccaaatcctgcaggtctccacgctcatgtcctctaatccacaaaccctcttctgatcattgtcagtgaaatagcgactccaacacccacacacatgctccccaaacccaaggcacaaatatctcttcccagcagtcatcaaacttcgctgtatttgtctgtcagccactgtgctgacctgttcactgtgtgaatccacctggtagaacccaaactccaccagagcaggactgtggctgagtggttccctgctgtgaccctatcctgacaggagcacctggcacttagtaggaccttcacattaggtgtgggaggcgtgagcaaagaagggaccagaagaagagagacacaaccatcccatctctccccagcctacaggaaaggctgcccaggtggcagtcctgggggcacgaaccttaccctgggtgtgggctgggatcagggctgtcctgtctggtagagctgggccaggtgcacgctgggacgtaacgggaggacccgaggtgcccgtggagctctgagactggaggccgctgtcagggctgcaggggcatcacaggtcagtctcggcgacctcgcctgagtctcccactcatcatcacctgttcagctctgatttccacagacacgatcactcagtacatgctggacagatgccctgagtccaacacgttccacggccacacgcaggccggaccagggccctgggcccctccctagtcttatccccaagtacttcatagccagatgagcactttcagaggcaagagtcaacctgctctctaggggaacgtgagagtctgtggaaagaagacctggctgcagaccccatcccagccaaggagggaggggtgacattcactctgtgaagcgtgacctagagtgactgcggagccagggccctgggcatggcagtggctggagtgaactggaagtaaggacaggaagtcagtggggccctccctgaatgatgggacccgagtccactcaaccccaaatgtcagccaggctggtggccccacaaggccagacactttcagggtggggcacacagaggagtctccaacaacaggtgcaaatgtgcttttgtgcatgtcagcacacacacacacgggtgcacacacacaaacacaccacacaattgtgcaagcacacacacaccacacctgcgcacgcacacacacacaccacaaacacaactcacacctgtgcatgcgtgcgcacacacacacctgtgcatacacacacagcaaacccatgcatgcacacacagacactgtgtcctaagtcactgcctgcaacctcacacactcctgtcccatttctcacttcagggacagaatgaccagccctagactcagacaggcctggtgctgagtgaagggggctcccctgggaacaccgacacctccacctggaagacaaggtcttggaagacaagatcttgaaattcttggagcaatagtctattgaccccacacaaatatccacctgcatcctcctctgtgaggctctccagggtcactgtgaagctgaggtttgcaggatggtccctgatggacactcagccattactcactcctgctgactctccagcctttacagtcttgtcacatagtagaaaaagtggttgtctgcaccagtatttgttgaaagtcctgtattcctcctcatactgacactgcacattcagggatccccactgcggtgtctgtcatggtgctggggccgcccacagcaaaacagcctggaaaatacaagccaaagtcccagcttctcctcagatgggcctgggtcagggatgttctggggtcagggcctctcggaccctggggttgtagaggagacagtggcaggcagacagcccttgtccacccaggaatctgaactgaggggtgagtagctccctccctgcagaggtgggaacggggaggggggtttccatggagacaggaagggcatggactgggaaaacactgtgcgtgtgcatgcctgtgtgtgcacgtgcatgcatctatgattgtatgtgtggttcatcaagatggcatttcggattggataactgtggcaatgacaatcacaggcacctctcccccagggccttctctgtcgaggatgcagtggaacatgactcacctgcgctgtgccctggagcctggcactcagctagtgaggcagctgctgacagctccttgatgctcctctgtcctcctgccctctctccatgtccctacttccatgtccagggcccacccacctgagacattcaggaggaacagagctgccagtagccgagcagcccgatccctggtggcctcttctcagatgtcacttgtcactgcatcaggctctggtaggacaaggtggagtcccctctcccagggtctgagccccacttctgctttctttccctatctgcttccttgtccagccctgtctcaagtctgaggctggagatgggagattgcagaaagctcaggagagaagctccctgggccggtgcaggcacgcctagactcaaggggccagggaccaggggccaaggtgcaaccaggatctgaagctcaatgggcagttccaaccagagcaagtttcatccctaaagacaagtgcccagggcagggggcatccaggcaggaaagaggaggacacatctgattctggcccatggcttccgctatattgagaagcagcacacacactgcacgttgaacttctcacttctgggagaggaagagacacccaatgtccctactgaacatgttcacctaggctggaacttggtttggtgacaatcttcaatgcttcttatttgtgaacaagggaagcagtctttgaagcactaactataaccaatgccagacctaagttagattatctatataacttgtgaaccaaagtgtatctgagacaagtcgcaattaattttggaagtttattttgccaaggttaaaagtacatccatgacagcctcaggaggtcctcacaacatgaggtggtcagggcacagcttggctttatacattttaaggatacataagacatcaatcagtatattagattggtacaaaagtaattgcagttttgccattacttttaatgcactccagcctgggcaacattagttttaatggcaaaaatcacaattacttttgcaccaacctaatatgtaagatgtacgttggttcggtctagaaaggcaaaacaactcaaagtgggagggggcttccaggtcacaggtagataagagacaaacagttgcatttttttgagtttctgattagcctttccaagggaagcaatcagatatacatttatctcagagagtaaagggatgacattgagttacatctgtcctttgtccgtaaggaatttctttgtgaacgaattgtgagggaggtatgtagctttttttttttaaatcttagtagctatcttttttagcaatagaacgggaggcaggtttgctctaaacagttcccagcttggctgttccctttggcttggtggttgtggggtctggagatttattttccttccacaaacttcagggctggttggcagaagtattgaacccatacatttatacgtatccttttattatctgcccccttgcagacagtgtcttgctttgctgcccaggctggagttcagtggcacaatcatagctccctgcagcctcaaattcctggactcaagcaatcttcccacctcagcctcccaaaccgttgggattataggcgtgagccactgcatccagccacaatcttctttttagagctcaattaattatactttattgctttttgtgtaccaagaaattgatctgtgaacttccctcatttaaaatataccgcaattttgtaaccttgttttttcatctctctctctctctctctctctctctcaaaaatagaagtggcccaggcccctctggaccttagggaggccctgaaggccagagaggaataaagcagatatgtctgattccagtccaaggaaagacattcactttgggctttaatctttgcttaattattttttcctttgcaaaagagaaagagactcaatttcctcagtgggtggctctatgatattggatgtgcagcttgtcgactccttaggcgttgtattctaagtttctctatggcaggccttgaaaaccaaacaattaatcaactccgggcaatgtctatggagaggtcactctgcatgtgagagggggacctccccagccagagtcttcctgagtttctgtgtggatcttcctgaatcaggtccttatgtgcaggcttgagagttgaagaaagaaattcccacagggtgcggtggctcacgcctgtaatcccggcactttgggaggctgaggcaagcggatcacttgaggccagaagtttgagaccagcctggccaacactgtgaaactccatctctactaaaaatacaaaaattagctgagcacagtggctcatgcctgtaatcctagcactttgagaggccgaagcgggtggataacttgaggccagaaattcgagaccagcctggccaacatggcaaaaccctgtctctaccaaaaaatacaaaaattagctggcgtggtggcatgcgcctgtagtcccagatactcgggaggctgaggcacaagaatcgcttgaacccgggtggcggaggttgcagtgagctgggatcgagccactgcactccagtctgggagacagagcaagtctatctcaaaaaaaaagaaaagaaagaaatccccacagggtcacatacacacgtactcaaacctaaagcccaatgtccactctcaaatcaccattgtctttgcactggttccctgttgaaaatttcaacctgtcagcacagccagggaccagcacagactgctttcagtttcgaactgtttcctgaaaagcaaaaggcactggaggagtgagaggagagggagagtgatgggtggaaggacttcgaaaacaatgactccctggagtttctcagtttgggtcgccttggccccctccgcctaaagcacccttctcattctgtttcctgagtctgaggattctgcttttcccttttgccatccctgggccactctgtcctcttcagtgtcctggtccagtgaagagactctagggcattagtgccggagaaatgctgacacgatcacttatactgtatgctttcggtcagattctttactctctcagagctgttggcaagatagctggaaggaggagagattaactctttctttggtggaaaaaaagatgaataaactgtaaccaaaaaagaaagtcaagcaaactttcagaagtataatctcatgttttggtttttaaattctttgatggaagtgtaacatacaaacaaaataatacaaatcgtaaatgtcggctcagcaaaatttgaggaaatgactacccgtgtctaacagccacccagatcagacacccacgcccttgaggagtctccttccatatggtatttgggtgggcctctgtgatccatagatatgagccacgggctatgacttccaagaataaaccatcaatggtactgtgccttgctctctcttggatcactatctccagggaaagctggtggctgtgtcttgaagactcacaagcagctcttttgagcaaggagctgaggcctcccaccagcagccacgtgaatgtgcgatgttggaagcagatcctccagccctggtccagtcttcagatgactgcagccccagccaacatcttgactagaacttgatgaaagagagatcctgagccagcaacacccagctaagcaactcccagattcacggctctcaaaatcatgagataatgaacatttgctgttttcagccgtgaagtcatgggggaatttgttatttatcaacagatatctaatatagttgggccacacttgcccagagccagtctctgcagccacatccaatccttattcatttattcactcagcaagtattttctttaatgccaacatttgtcaccacactctgtagctggatgctggggcattcgtggtgaatgaagctggcccaaatgctgctgtgatataaagggagatggatagaaaccacccgaaggaaacacattaacagcatttggcaaactgtggagaaaataaacagggacccataatcaagacaattggggtgatccctgcaaagggtgatcagaggcatttcagaggaggcaacatcagaggtgaaaccaaaaggataagaaagagccagaggtaagaagatctgggggaagggattcagggggaggaacagcaggtgttaaggccctggggagggatgcacactgtggctagaacataaagaccacatggggacagggcaacatgatgaaaaggaagaacaaacgagtggctgggtcccctcagaccaagtaggccaagcaaggagagtgggtgctatggtttggctgtgtcctccctccaatctcaaattacagctctcataatacccatgtgccatgggagggacctggtgggaggtaaataaatcatggtggcaggtcttatgttgttctcatgatagtgaataagtctcacaagatctgatggttttataaagaggcattcccctgcacatgctctctctcttgcctgccaccgtgtaagatgtgacattgctcctcctttgccttccaccatgattgtgaggcctccccagtcaagtggaactatgagtcaattaaacctctttcctttataaattagtctcagttatgtcttttttttgggggggtggggacggagtcttgctcttgtcacccaggctatagtgcagtggcacaatctcagctcactgcaatctccatctcccaggttcaagcaattctcctgcctcagcctcctgagtagctgggattacaggcacctgctaccatgtctggctaatttttgtacttttagtagagacagggttttgccatactgaccaggctggtctcgaactcctgacctcaggtgatccacctgcctcagcctcccaaagtactgggattacagtcatgagccactgcgcccggcctcaggtatgtctaataccttacttttgggagaggaagagacacccagtgtccctactgaacatgttcacctaggctggaacttggtttggtgacaatcttcaatgccttttactatctgtgaacaagggaagcagctctttgaagcactaactacaatcagtgccaggaaaggtctgagggaaggcagctgtggggataagaaacacccccttcctgcccctgcacccctttctccttgttagtgcccatctcacctgctgtagtcaactcttcatcgtaagggtctgggccagagctaccaccaccagcaagcttcctggctgacaggtggcttaggcacaggagaagggtctgaacaaggtacacttcatctctgcccagacttccagctctcagagagcaagaagtttatgttttcaaaagacagcatgtttttgacgttgcctgcaaagggtgtttaaaggaaataagagagatgtgaagagggctgggttagattggtcaagagaggagccttttcctgggtaatgacttcccaaacacgtgtgacaaatccacttagacatgagccagaggacatgttagaggaggctggaggggagaggcagttgtagagggtgagatgagagtttttaagctgaaactaaacattgtccaagcagtggccttttcatatccacatccctctttttccacatcccccatcgctaagccctgggaactgctcatttgtcatctatttctgtacttttgtcattttgagggtgttatagaaatggagcaatacggtacgtaaactgcagattggagcttttcactcagcataacctcctcgagattcatccaaattgttgcgtacatcaatagcttgctcctctctagtgctggagtggcattctgtggtaggaatgaactgcaatttgttgaaccgttcacccctgaaaggatgtctggcttgcttccagttcaggactattatgaataaagctgctgtgaattttcatgcacaggtttttgggtgaacataagtttccattctctgagataaatacctaagaatgcgttcactggatcatatggtccttgcatggttggttttgtaagaaactgacaaactattttccagagtgtttgcaccattttacattcctgccagccacataggagtgatccagtttcaccacatccttcagcatttggtgttgttaagggaggaggccactcctcatattgtcttatgcccaatttctgcctccaaagaaagaagaagtaaaaactaaaaggcagaaatgaaatccacaagcagacagcccagcaccacaccctgggcctggtaaagatagacccctgacctaatcggttatttgcataaaaaagcactgtgaagatccctgtcctgttctgttccgttctaattaacagtgtatgcgtcccctagtcacgtaccccctgcttgctcaatcagtcaggaccctctcatgcagacccccttagagttgtgagcccttaacaggacaggaactgctcactcaggtagctcagctcttgagacaggagtcttgccgatgctcccagccgaataaaccccttccttctttaactcggtgtctgaggagttttgtctgtggctcttcctgctacatagtcactatttttttattttagccactcagataggcaaatatatccatccaaataactctctcccagggctaattcctagagaaagtaaacaactggcctgcaagtctgcctttgatatgcaaaccaaaccattccctattccatgcccccacctgcttcctttcagcaggctcctgcagtctgggatattttctttcccctgccctaaatcaccccagggccaggtaccagacaactagagaccactcttgtatcctagcccatcagaataattcaaactacacactccgaagcctgctgtttgcttaccttaccttgcctatcacttcctctgaaaaccatgataaaggctcccacatacatttcctctctctctctctctgccccttcacccgccctcgtgcttccccgtgtggccctacatggcacactgcacctcctgcttctaggggtctttgagtagaaacttatttctttatgacagtcatttccgtatctgcatgccttaccatatctggttaaaacaaatcctggtacatttttttgttttgttttgagacagggtctcactgtgtcacccaggccacagtgtagtggtatgatcatagctcactgcagcctccatctcccaggctcaagcattcctcctgcctcagccttctgagaagctgggactacaggtgcgtgccaccatgcctggctaaattttttttttaagtaggcatgaagtcttgctatgttgcccaggctgagttcaagcaatcatcccgtctcagcctcccaaagtgttggcattagagatgggagccaccatgcccagcctcaggtacatttttaaacatgtcctcaatacattaacctggtccctgaaaaactcagaggggtcccatcatataacagtaaaccaacttaaactgaaccagttgatggcccaatcacagttttgttttgtttttgtttgtttgtagggagttccctacaatctactgtcaggaaaggaaaaaaatccaatatggtttatgagcagaagaacttgcaacagtatgatttcctctgtgcaggattcaaaaacaaccatgtccttgctcagcacactaaagcaagggagtgattactccaagaaatattcagatagtatttaaccctgacagtaggggaaagacagttatgaggtcagggagaggcatatggggggcttcaaacatcttaataatgattgatttcctaggctgaatggtgggtacacatgtttatttttagtccttgaactgtatagatacctcatatacatactcttgtgtatgggatgtattttatttatttatttgtttatctgagacagggtctccctctgtcacccaggctggagtgcagtggcacaatctcgactcaatgcaacctccacctccggggctcaagcgatcctcctgtctcagcttcccaagtagctgggatcacaggcatacaccaccacaccctgctaatttttgtatttttttgtagagatgaggtctgaccatgctgcccaggctgctctcaaactcctggactcaagtgatccacctgccttggcctcccaaagtgctgggattgcaggtgtaagccaccgcacccggcctacatttttttttaacttttaaaaagtatccggtgataagatggaaagaaatatgagggtcagggtcagaagtcctttttgcagtcagaggggctgtgtctctggacagggttccaatgggcatggggtgttgcaagttctcctgttcatgactctgtccaaggagtcctccaaggcctgttcacccagaggatagcaccgagtatgctcaggagcagaggcaccttcaggagtgggagaagcaggaagcaggtgctgctgggcagggacctgtgagacggagagagtgactagtagtaagctgccttctccggggagtcccaggctctgcctctcccccgccttccctcgaggtctcgtcctgtgccctcaaacccaatgtcagcatcaagcctggtgggtaccagggtcaggcagccccatgctgagggtcacaggctcctgaccttcattcagctcagaattaaccttgagtgtcaagacccaacagatgccggaggtgagggatagagaagaagagagatatgttaacccaggcaggaactggctcccagaaacaacttcctgaacagatccctcagccactgatgcccgcaggaactcagctcttgctgggaacaacctcaaggatgaaatactcctttacaaccatcttcactcaaattaaatatgatcacaagaacagctcttttgcttaaacggcttaacaatctcaaccccaaggagtgaactctccaagctcagcccatggccagtcgtctcgctccgtgggtcccactacactgctcccattccaactcctcagatgctgcattctctccccaaaatgggccgctgtgccatctctccaccttcccagccctctacctgcagggcttgtctgatgccctccctgatcctctctaagacgagtccctgtaacaaaccctgttggcgccctgccccatatcacctttgcccacttgagctcctggcagctgcaggcagtcttggccccaccaaggatttcccagctcaagctccccatctctgcctgaggttatctacaagagtgcacacattttcctgtgcagagcaggccagatgggccacagaattcatgcccccaggagtgcctgctgcctggaagactctgtctccagttctgaggaacgttctacacagtctctcatagggtgcccagaggggttaatctccagtgactccagttactacggggataaccccttcattacagcacatttcaccgcccttcccctttcctggtctcactttctgctctctcaatgtacttcttgagattacctctcaataaacaaattgctcctaagtccttgtctcaggacctgatttgggggaaacccaaactaagacagtccctttgttctttgtttctgtggaacatcttgtatttccttgatagcccaaatcatgccccaccagcttcccacacactctggcaccctatctctttacacctgctttattttcctccacagtaattatcattcgttgacatatttccttgatctatcgtctctctgtctctattacatatctctctctgccagctatcatctccatctgtctttccagtcagccagccagccatctctatcatctttcatatcatatctatcatctgtctgtttatctatctatccacctatctatctatctatctatctatctatctatccatctatctgtctgtccacctgtctgtctgtctatctatctatccatctggccattgcctgaatctacctatttgcaacttcctcaagagcacaatcttgcccctttgttcactgttgcatctctagaatctccatcagtttctggcgcataacaaataaacacctgttggccgagcacggtggctcacacctgtaatcccagcactttgggaggccgaggcgggcagatcacgaggtcaggagatcgagaccatcctggctaacatggtgaaacccccgtctctactaaaaatacaaaaaaaaaaattagccgggcctagtggcgggcgcctgtagtcccagctactcaggaggctgaggcaggagaatggcgtgaacccgggaggcggagtttgcagtgagccgagatcgtgccactgcagtccagcctcggcgatagagctagactctgtctcaaaaaataaataaataaataaatgttgagtgggtgaataatcaaggaaacctgtgtctaggaagccccaccctaggaaagaagctgcacacatggcaaaagacactgggacacgtgcattttacccttggcattggctgggcctggtgggagatgcaggtgtcttcacagagttctcagtactggaggctgaggataaagaacagaggttcagtgccctacgcctgactcttcccagctgagtacctggtacctgcatggttctgacttcataaagcagaggacgctcaaggaggcagctggacagatgttctaggaccatcgtcttccaataggcagaccaaagcctgactggagtaacagagcatccccccaaccccatcccaatggatgccctgctctggggccgggtgggcattttataaacccagaccagaggatgaccaccttctcccatgttggtgtcccccatctcgctgaaaatcaacatgccgaaggttaggcttaggttccaaaacccccatccttgccagtgtatccacacaccaccactaccctccagcacacactctctgtctcacacacactctcacacctgcacacacactctcacatgtgcactcacgcaacttcacaaatacactcacacgcccactcactcacacacgcctgctctcacacacactctcacatgcacactcacacacctgctctcacacacacacctgctctcacacacactcacacacacctgctctcacacacacccacacaccagctcttgcacacactcacacacttgctctcacacacactcacacactcacacacctgctctcacacacactcccacactcactcacacctgctctcacacactcacactcacacacacttgctccctcacacactcacacacactcacacacacctgctctctcacacattcacacacacctgctttcacacacaccttcacacctgcactcactctcacatgtttgcacacaactcacagtcacacactgaaacacacttacactgtcccactcattcaaacacacatgtatttcccacacacattcacacaacatactctgtcctgagtctctgatgcaccacactaggcccagttcttctctcctgggccaaaatttctgtggctgctctgcagagatggcctcagatgcctgagaaaagaggctcttacccgatgagaccagcacttgaacctggaagaagggatcgggcaggaaaccagacaggccatcttcctgcagtattgttgcaatcccacatcggtattttcctgcatcgtctgccgtgaggttctccaaggtcacggtgaaggtgaggtctccaggatggtccgtgatgatcacttggtcactcctcaccactccctcagaccctccggtctccaccatttcatgccaaattggcaagcatggttgtctgcaccagtatttgttaaacgtcttgtatttctcttcataccgacactgaacactcagggattcccccacggcgcccatcacggtgctggggccactcacagtcagacagcctggaaaacacaagtccgtttccccgtcttcacctggaagagtctggaccagtggaaccttgagtgtcaggtcctctgcacgcccagtgttgcctgaggctggaggagggaggagtcgggaaccagggagctatgggctatttgcagggggagacccaaggagatgcccggtgtgggatcctgagactccagaggccatgccagcctgggtgtgctcagccatcttataatatcagggggagaggcttgacctcggtggcctcagacaggttctgggtcccccagaagtgtcagtcctgagaagaaacacctgtcctcatcgaacaccaatgattgaatgaagccactaagtacactctgaataaatggatggctggagagatagatggatggatggatggatggatggatggatggatggacggatggatgaaataggaaaggaaataatattgagaaccaggaaaaaccagaagcagcccagtatggagggcaaggaggaagcctggggcttctggttctgcccctttcccaaatcatctgtgggcctcatacttgccatccctgcccatatagatgaggcctcctgctcccaggtctgggtcacagagaatatgggggctgcccatggggatatcaaggggccatgtagaaaggagttgttcttgtgattcaaggacatttacgcctggaattttcccccgggacagaatcctgcagcaacactcgccattgcctaacatctgcagggctccgctccacagggacacccatcagagcttccttcccacccccaattctctgcagcacccacccgccttggcatgtcctgggcctcttctccaggtcctctgccccctccaatatttcgacattactctccctcttcgagtcccctctctcattcctccacccactctgcaggctccgggtccaaatgattgggacccagccccatcaactctctgcttcctgcctcgggggcctcaccagtcctaaacagctgctgtctcatctgctcttgacagggaggtggttaactcaggacaaaacggctattgagaaatggttttggcaaaataccaagctcctgaaaaggaattgtggatgtaatctgtctacctatcaactatctatctatctatctatctatctatctatctatctatctactatctatccatccatccatctttcatctacccacccatccatctaggtaatatattgccatccactgatggagaggctttgctatatttttattgtgaattaaaagaaaaatctggccaggtgtggtggctcatgccgataatcccagcactttgggaggccgaggcaggtggatcacctgaggtcaggagtttgagaccagcctaaccaacacgatgaaaccctgtccctatcgaaaatacaaaaaattagccgggcgtggtggtgggtgcctgtaatccagctactcaggaggctgagggaggagaatcacttgaacccaggaggtggaggttgcagtgagccgagatcgcaccactgcactccagcctgggcgacagagtgagactctgtctcaaaaaaaaaacaggaaaactttatcttttgcatcttcattttcttatctcacgttttctcactttatttcccagaaagcaggctcgagtggcccactgacctattctgcattagaaagctgtctgcctctctgaagcagtgattctcacctggggggcaggggggcggggagggggcgggggggcaggggggcgggcgggagaacatttggtaatgactacagatatttttggttgtcccaacttagggtggggaattgctgctggcatctggtgggtagaggccagggatgcttctaaacatcttacaatgcacaggacagcccccaacacacagaataacgcagccccaaatgtccacagtgttgaggtccacgagctttcccagggagctaactgcctgccaggcacaggcttaggagcaaggaaggggtgggcacacccagtcctctcctgaaatcgctgctgctctcagctcaggctctgggggcgctgttagcctgctctttcaggtccttaaacttctctcttaatgatttggggctaattccacaaggagcaaaaacattgtggggcacacactgaatcccaccacagagcctccctctccttggatattcagtccagaccctgactctgagccaacatgggcagcctcctccacctccacccccaccatcttttacggagcttcccgcctacccagccttgcaaagaaactgactttctccctccaccatcatttacggaaactctcggaccagggctgaccacaggttcccagctgtctcacccttctgggggcccattaagtagcagccctggggccagcccagacctgtggggacacccagggttcccacgtggggatgcagcatatgcctccagatatgtaagtgaagctttacaaggaggcgcagcagacattgacattgaattagagaaggagcaatgatcttggaaataaaagtatttaggtttggaccttgactgtgccttttataaactgtttaatctaaattatttgcacctctaagagcgagcttcggtctcttgttttcatcaggattgcaataagaattaaatgagatagtgggaaacaagatatgtattacagtgattagcctagtaagtactggttttctgtcccctattcccccttctctctgatggatcgtggtggcattcctgatcttaataatgacggtaataatgattaaagttgccaaatctacttagggcttactgtgtgggaagcagtttaccgtttaatccccaccctatcccgataaggagatttgagaagcttctatgcacacctcactccctctttcttgatatcatttcttcctcttgcccctcgccagccttttctcatgcctgcctcaccctgacccgccagagcagacctccctgcacccaggacctgccctgctcatctgggacacagagaaggagcagagctgaaggcagcatggcagccccagccctctgggtcatctcaccagcatggaagtcccttgtggcagcagggtctgaggctctttttccttctcacatctctcgtttccttctctggcctcttctgggtttggttctcagagctggtgagagtatggaggaagctggggccatggggcactatgtggtcaggtgaaacaattttgagaacttgctgaagttcttcctaataaaacatgtttgcatttgctgttcctctttctgttcccagtaaagacaatgtccctcccattacccacagctgacaggcctgcccttctccaaatcacagcatggcccaggaccagtgagactgggccagctgccatctggattttctgggcaggtcctcccctctgtgaatggccagttttctgtggccagcatgagccgccccagggtatggctcagccttcactggatggatgagactggctatttgcagagcccagtgtaaaatcaaacctaggtttccaaaattattaagaatttcaagatggtgacagccaagcatgaaacgtgggacccttctaagagccgggcctgcgagactgcacagggtaggggcacacccacgatgcccgctggtctatctctgatccttggtggtacagataggctgggtgcaacctcagaggctctgacctcttaacccctcactcttgctctgacctcagcagaccccagaggtccctgtcttggccacgtgcctgactgtttccacagacctggcaccacgcagagcttggtggaccatctataagccttgcttttgacctgtgtggctcttcctgtcgcccaagatgaccacatataagagtttcaatatatcaagagctaactcgggggaacctggccagaagtgtgcctgatatacacagaatggctgtggaggatttataaatgcaagcacagcttcagaaggcctcactcagggacttagatttctggaactaggagactccaaattcctggcattctgttatcaaatgtctcctccttggtgtttcagtaaatgtgtttcctgcttgttcattttttgctgcatgtggagtcctcatatttctgtgtgtgttcacatgtgtgtatatgggtgtggtatgagggatatatgtgtagtgtgtgtggtgtgggtagtgtgtgtagtatgtgtggtatgtgtgtatgtaggtacatgtgatgtatgtgcatggtgtgtgggatggtgtgtgtgtagtgtgtgtgtatgtgtggtgtgagtggtgtgtgtgagatgtgtgtagtgtgtgtgtatgtgtgtggtgtttggggtcgtgtgtgtggtgtgagtggtgtgtgtggtgtgggtgggatgtgtgtagtgtgtgtatgtgtgtacatgtggtgtatgtgtgtgatgtgtggggtggggtgcatgtagtgtgtgtgtttgcatgtgtgtgtggtgtgtgtgcacaggtggtgtgtgtgtagtgtgtatgtgtgtgcacgtgtgtggtgtgagatgtgtgtacatgtggtgtatatgtacagtatgtggggtagggtgtgtgtaatgtgtgtgtggtgtgtgtgatgtgagtggtgtgtatgagatgagatgtgtgtagtgtgtatgtgtgtacgtgtgtgtggtgtgttgggtggtgtgtgtagtgtgtatatgtgtgcatgtgtgggagtgtatgtggtgtgtgcgtgtccatgtgtggtgtacgtgtgtggtatgtggggtggtgtgtggtgtatgtgtgtggtatgtggggtgatgtgtgtagtgtatgtatgtgtgtgcatgtgtgggcgtggagggtgtgggtggtgtgtgtgtacatgtggtgtatgtgtgtggtgtgtgtatgtgtgtgcatgtgtggggggtgtgggtggtgtgtgtctacatgtggcgtatgtgtgtggtgtgtggggtggtgtgtgcatgtgtgggcgtggggaggtgtatgggtgtgtgtgtgtgtacatgtggtgtatatgtgtggtgtgtgggttggtgcgtgcatgtgtgtggaggggaagcaggagctgggagtgataaagatgtctccccttgcagcctgcagagccggttgcgagccccgccctctgtgcctagctctgggcgctaaggaaaggcttgcctggccctccctgactctgcgtcaagggctgctcaacgtgcctttcttgggaagaagggatctgagtctgtgaaggagatgacgcacagctgcagacttttccagaaaacattctcgccatccttgtctggacaaaccaccgggtgcacagggttgtattagtcagctctttctggctcacattgccatagcaaaactcctaatcccagcatgctgtaaccacagaagcttgtttctcgctcgtctatacgcaagcggtgagtcagcattgcttgggcaccaggctgcggagcccagtccgctagaggagagggaaggcaccgggtggctctctgagcctctgctcagaaggcgcacatgcggctcctgctcaccgttcatcgtcatagggtcaagcctgaagtcagtgggaaggagaagcacagtcctcttacaggacaaggcggcaagtcactgaccacaaccacagaacccactactggaggttccctaaccgggctggaagggtgccccgcagcacaccgactccgtgcttctcgctcatccaaggtcggggcagggagaggctgcagggtctgcttagaaacagcctgtgtgtgtttcatttttttagctaggaccagacagtttgccaaatgcaaaggacatggcaatgccacagggaacccacctttgaagcagatgtactctgggccctggagtcccccaggagatgacaaattccttgaagagatgacccacatctgggacatccaggctttttccatgtcaaggccagcatctggagccgctgtcccttccccagcaggcccttgtccttctgtctctgaaacctgtcctggaaaatgctgtccgctccaggagggcagagctaggggaggactgagaataatgaacactggccatgaggcacaggagggcggggagcccggggccctgcctggcactgcaccacactgagacccccaccatcgctgcccttgagggacagctcttggggcttccagaaagttaagatctcatcagtgaggggtgcgttcttagggcaaactcggggcatgtgatgtgtaggacagtgtgagtagcccacacatttctctctgcctttcggggctgtgcttgtctttctgcttcctcgaaaaccgtcatcctcccttctcactctcccaggatgagctcagaccacacctctcctggaaggcatccctgcctgctccaggccttccagacccctccctctggggttcctgttacctgcaatgcttatttctgtatttaatctcatgtccctgtgctgtcattgtcctgttgcatggcatccatttccaggtgaggctgtagcctccacaaaggcaggaccaatctgggcacccggagacgcagacagagctcggccccagccttgtgagctgaattggagggtgagagctccgatccttccatattttccaggggaggggatcaggaatgtattaaggcattgggcctctcttctctcacctctactacccgacgtcaatccatttggggagtagttctcagtatcttgtgcatcatggtgagaatgggcaagtgcccaaggatggtggaccccactgcccactttcttccctccccactggcactcaagggagacgtcaccaagagggcagcctcctgaccggctctgggcaatggatgcctctttgggatcttgttacaaatacagggctctctagggagcagggtgtggggagggtcttcccaacatgggggctggggtgctatagggagcccggctcagagagggtctctacctgactctgatgatgtgggccatgtagcacagtgaggaaggttctggccataagctgggagccctggctcagattttaaggtctgctgttcactagttatatgactttaggcaaatcagcaaaagtctcttagcatcagtctcctcatctgtgaaataggaataaaaatattcaccctgctcagtcccaggagttgagcaaaggcatttgaaggtggtggcatccctctgggaaactttcctcttttgatcttctacgtaccatgcactctgtatatttaaatcctgcatacccatcccaacacccctgccaggtcacttttaaataagatgactggagctggaaagacgaactaaactgtcatgatgggaagtggggaggtcaggatttgaacccaggtcttcggtggggtcccacctctggctctcatgatgcaaggtacggattgcaacactcaggcaggggtgagatgggttgagagatggcaagtggaagaggcctccaagtcttatttcattcaatatctgtttgcagaatagcaggaagtatcttcaggggaaattaacaacacaacaaagtctgcttctgggtgtctgctatggattgatgagttcccccaaaaattcatatgtggaagccctaacccgtaatgtggtgatattaggaaatgagcctgtgggaggtaattagggttagatgaggtcatgaggatcaggccttcattgtgggattagtgcccttatcagaagaagaagagagatctcactttctttcttagtccatttaggctgctattttaaaataccatagactgggtgggttatgaacaacagaaatgcattactcacagttgtggaggctggaaagtccaagatcaaagtgctagcagattcagtgtctgttgcgcactcaccttctggttcataaagagtacttttttttgctgtgtcttcacatggtggaaggggcaagacagctctctggggtctcttttacaagggtactaatcctgttcataagggttacacccccacaactgaattatccccaaggatccacctcctaataccaacacactgggaataagtttcaacacatgaattctggagaaacacaaacactcagaccatagcactctctctgccatacgaggatacagaaagatggcagccatctgcaagtcaagaagagagtcctcaccaaacaccaaatctaccaacatcttgatcttgacttcccagccttcagaactataataaataaaggtcccttgtttataaaccactcggtttatggtattttgttacagcagcctgagctgactgagacaacgtcctggtgtctgtcccaatgcttcaccgttctggcttttcagcatgagtcacctgtgctccttctccctggaggagccctgtctggggcaagacctttgcagaaacagtgaggcttcttgtcactttcctcatttggaaatcagggatttggatgacaactggattccaccaactgaggtgtctctgaggccatttgaaaggcccagttagacagaggttatcttccacagctcttagccactgctgttggcaaacaaggattagaagaaacaggagactttcatgaagcagagttccaggatatgttttctagcttcctgggtgacaagaagcagtgagggcagtgacaacttcttcatctgacttccattaggaagattccttggattgcagcttcataaaattattctctagcttcctggatgtggaaggcagttgcttggcagataccaagacttcatgctccctgtttgaccctaggggcctcaaaagcaggctgttctggatgtgagggaggagggagggacaagcttaggagctgcttcttcggccctttccacaatattataagcacctaattctctgcataccttctagtgcccacctagaatgggcactagacctgagtggatacatactcttggaaggatccaatcccagcaataaggttgttattaactaagataaaggaaacccacattatacagctcctcctgtctctgggtcaagggagagcgggcaggcaggagagtcatcttagaaccgcatgccatgtgttctcattccatccagcaggtgacttgtgccaggcactgctatctacactggtgaacaagactgaggccctgcagggtcctgatgggtactagaggctctggttccaatatgaggaggatgaacacttcagcacagttgtctttttagtagacggaccaggaaatcagaggagctctctgttactccataagggctgtggttctcagtaataactaatggctgttgttctcaataataactaatggctgtggttctcaataataactaatggctgtggttctcagtaataactaatggctgtggttctcagtaataactaatggctgtggttctcagtaataactaatggctgtggttctcagtaataactaatggctgtggttctcagtaataactaatggctgaggttctcagtaataactaatggctgtggttcttagtaataactaatggctgtggttctcaataataactaatggttgtggttctcagtaataactaatggttgtggttctcaataataactaatggctgtggttctcagtaataactaatggctgtggttctcagtaataactaatggctgaggttctcagtaatgaccaaaatccagcagcaatgcattatagtcaatggtagaacactgctgcattttggtcattccttgaaacccatttgcttgaaactcagttctgctacaattgcagggatgtatgcaggaaaaatattaactcagcaggcttaggttgtccaaagcctgcaccttcccgaaaaaagtttagcccttgctttgcttctaggagataagctctaaacccttggaatatcctgcctggttagattgtctttttttatctgggggctttgatgccatgctggatagctcatgttaaccatgtgattatggtgggggcttctagccatgctagatggttgatgctatcaatgtaattcatgggtgggtagggggaactttgagctatgtagttttaatttgatctctggcgacttaggcactgaggtcagttctacaggtgttccatgactatgtgactgaccccagtgaactctctggataccaaggcttgggtgagcatccctggatggagcactttgtgtgtgttgtcacacattgttgctaggatgggagaattaaacactgtctgcaaaatcccactgggagaggacagctggcagcttgcaccacgcactttttacctttactggttttaatccatatcctttcagtgtaataaaccataaccatgcatataacagcttttctgagttctgagtccttctagtgtagccgagtccaaagctcaaactgcttgccaagcaacagccagtaagtcgagagacaagctgttggggcaaggaagatggctttacaaggcagcaaaccaaagagatggtggactcatgtcctaaagagcaatcataaaaggcatgaacctcaagcttctttttatattggggaaggcagaacaaggaggaggttgagccgggtagtgacaggtgaccacagacatctgggtgtcagctgaggaggttgcattaacttctttgttcttggtcaggtcacaatgctcctataaatcgttagcataacattgttactgtgtgtatgtcttccttattgcttcaggggtgttgcaaagggactattatcatccttgctttaaagtgaaactatagccaggtgtgatggctcatgcctgtaatcccagcaatttgggaggccaaggcaggcagatcacctgaggtcaggagttcgagaccagcctggccaacagggtgaaaccttgtctctactaaaaatacaaaagttagccgggtgtggtggtgcacacctgtagtcccacctagtcaggaggctgaggcaggagaattgcttgaactcaggaggcagaggttgcagtgagccgagatcgcgccactgcactccagcctgagcaacagagcgagactctatctcaaaaaaaaaaaagaaagaaagaaagaaaagaaaaaaagttaaactatacactaaattcctcccacagttagtttgggttatatgctaaagatattgcagggtaggggtgtggtcaggagcaaaatggagtttgttattctagacctccttttcatggttatgctagtgaatcattaaacctgggagtggtattgggtacccccaataagagatggaaagtttgactgaattttagtgcaatatgataacagaggggagagccacctgttgtgatgatagggaagcggggtaaggtaccatcaagctagcttccagtgaaaaagagtgtttacccaggagtactaggtcccacaggtacaggagggagtacggcaaatgaggtgagaaattctactcaaatagtggccaggcacagtggctcatgcctgtaatcattgcactttgggaggccaaggcaggccaatcacctgaggtcaggagttcgagaccagccttgccaacatgatgaaaccccatctctactaaaaatacaaaaaattagctgagcgtggtggtgcacatctgtaatcccagctactcgggaggctgaggcaggagaaccgcttgaacccgggagttggaggttgcaatgagccgagatcatgccgctacactccagcctgggcgacagattgagactctgtctcaaagaaaaaaaaaaaagaaaaagaaaaagaaaaagaaaagaaattctactcaaatagtgatcttgttgggaagatgtccaagttaattcagttacagagatcaacatcatatatctttcatttcattagacttgtcaacatctttccaaggaaattgcttttggatttgtcatggatattcgattttgctttatttgtttgctatcatttttgtaattagtttctgctacattagaccctttatccatcaataccacagtgtttattcaaatatattcccactacatgtctatgaatgttattgattattgagtattgactagagaaagaatctcttatatgggtagcaagaacagagaagttagcttatagaaagaattaaatcagtaaatttagacgcaattgtgcaaattagctagtcttgacaggaaagagaaactttgagatattcgacaaaataagaaaggaaaatggcagaatgagaatcgatttgcattctttcaaccataagaatgaggatgttgatctggttaactgcctcttgctagtagatctggggaggaattggaaagacaaagattgaggtcgtgaaggggaagaataagacaagtaaagcacagtcacgttgagctgctggttttggtgacctatggctccccggcggctgtgattggagtctgaagctgagaagtcatgaggctaaatgtcccgattgtcttgccaagctgcttagaccttgccacttagaccttgttgcttagaaggagacaccagaaaccaggaacttgaggctgggataaagcagatgctttctctcctggtgctctgggaagggagtttgaagtaatctaggcagcttgctgcttgtgccttcatcctggcgggcaaaatcaccttgagtggaggtagaacacgtgtatctgccaaactgtgattctctaagggcaaggattacatctctgtttttttgtttgtttgttggtttttgagacggagtcaggctagagtgcagtggcgccatcttggctcactgcaagctctgcctcccgggttcacgccattctcctgcctcagcctcccaagtagctgggactacaggcgcccgccaccacgtcctgctaattttttgtatttttagtagagacggggtttcaccgtgttagccaggatggtcttgatctcctgacctcgtgacccgcccgcctcggcctcccaaagtgctgggattacaggcgtgagccaccgcgcccggcccccaaaaggaaactcttgatttgacctcctgcaaactccccagcctgatcctcttctcatcacagtaaattacacccatggtcccctttttctcagaccaaactccagtcacctgggcaacatccttggctcatcttttgctcgtgccccagccattgtgttaacccaagaccctcagatctgtccacttttctccattgccctcccacccccctctttctccctgattaccacagggccttccctcttgaacaggcacaagagctccccagtctgactcttgtccctattcactgtggctagattgcacttttaaaaacagttaccagaggcggggcgggtggatcacctgaggtcaggagtttgagaccagcctgatcaatatgttgaaaccccgtctctgctaaaaatacaaaaattaactgggcgtggtggcatgtgcctgtattcccagctactcgggaagctgaagcaggagaattgcttgaagccaggatgcagaggttgcagtgagccaagatcgcgccactgcactcccgcctgggtgacagaacgaggctccgtctcaaaaaaaaaaaaaacaagcaaacaaaaaaaccaacaatgaatatcatcaatacaaaaaccaccatactgacaatattagtacggggaagaggatggtgggaaaagaggaagatacagaagtcctcatcttttgctgcagagagtcaatagaaagattcaataatgttgttaaaaacaagatgagaacgtgggagctcagagagtgttatgagttggtggggtgtccacactgggtgggggctgggagcagcgctggtcagagcctgggcagcagacaggacatgggtcagcccagagaggggcggcagagctcatgaagggtgaggctgggggtgggggagtctggataataaccatgatttcatcattttctagctgagtgatcctttatctttgagcctgtagactgccttcacggcacttacccaggtctttttctttatttcggtgatagttgtacttgaacagtgcctgatacttagtggatgcttagtaaatgttttcgcttattttttatttttatttatgtattttttgtgacagagtctccctcaatcacccaggctggagtgcagtggtgcaatctggacttactgcaacctccacctcccaggctcaagagattctcatgtctcagcctcccaagtagctgggattataggtgtgcgccaccatacccagctaagttttgtacttttagtagagatggggtttcaccatgttggccaggatggtctcaaagtcctggcctcaagtgatctacccacctcggcctcccaaagttctgggattacaggagtgagccactgcgcccagcattttggaatgaatgatggtggggagtgaataagggtctcacctgggtacagagattgacctgacagagggcagttgggtgatcctggttcatgttcccagaagggaatttctgttatttagcctctgtcttaaccaccagatgatcccactgggcagggggctcagtcattagagtccaagactgagcaccaccctggggacccaggcaggcggtactgaggacccagccatccccagctcacagttctagctctggcatccagtttatggattatgtcacagtccccaaaatgtatgggtgatctccccatataccccaaattgagagtagcagccaactgcaatactcttaaaagaggtaagaaaatgtaacaatcaacactaatagaaaagtcttacagtgacgaaaggaggctgtgttttcccatcatcttcaatcgtactcatccaggaatctcctgacttcccttccccacaagtggcaggagagcagctggcacggcagcccggaaacctctgctctcttctgtactcatcttcccttaagttggcccattaccagagtttggttccgtttttctgttttcatgggtttaggattttgaaacccattattgactggagacttgaaccccacggaatgcaaagacaggtccgttaacattgcatgtggctcacagacctgagatcacgaatgtccactacggcataggtgcctctcgggggaaacacattcttctcatgttttctactgcattggagacctcagaaggaagaagggctctgtcaggccccagggactgtgcagagaagggaatagccccaggtggcacggctgcaggagataggggactaggaggctgttccctgaagctggggccagcactgcctctagaaccacagtcaattccccatagaaatgttgtttttctgccaggtgcggtggctcacacctgtaatcccaccactttgggaggcgaagcgggaggatctcttgaggtcaagagttcgagaccagcctgggcaacgtggtggaagcccatctctacaaaaaaatttaaaaattagctgggggtggtggcatgtgcctgtagccccagctactctggaggttgaggcaggaggatcgcttgagcctgggaggggaaagttgcagtgagcagagattacaccattgcattccagcctgggtgacagagcaagactctatctctagaaagaaaaaaagaagagaaaagaaaatgttttttcttctgtgggagggcctttcgccctggacaggacgtcaatgggcattgggactctcatcatcgggctgactcctcctccttcaagaccttctttgtggtctgtttacccagaggacggtccccagcatgctcaggagcagaggcagctccaggaggaacaggaacaggaagtgggtgctcttgagcggggacctgtgggaacacggtgacaggaaatgagctgcctcctgggtcagaggtctcaggtcttctcagctctatgcccagatcctggcttccaatgtctatgtgagggtaagcctggaaccccagacaggccagcccctttggtggggcacagtcacactgctcaccagcgaggctcccagtcctccctacacctccagtaaactcagcctggcattcaaggtcccgtctgccaactcccatccggcctttttggctggtctcccataactcctcctcacctatcttgaaggggtttagcattccctgtctctacttacctcggcttctgctgcattctgcacccagagggcctctccgccctcatcgctgcctgtgcaaacgctacccacctttcaggtatcagatctgacatcatattcttgaaggccttggaggctgaccttgctctgaccctcttcctgtggaccagcacctggccctggggttccttatgttccctgttactttctatggatgtgtaaggcccagaaccttattgaccatcaattccaccccctcaccatcctccacccacttcccagggtctcgacctcccaacttgggccttcgttgtttctttcacctcagcgcaacttgaagccactctcagctcacggataaattttaaaaatcaggccaggcgtggtggttcgcacgtgtaatcccagcactttgggaggccaaggcaggtggattgcttgagcccaagagttcaagaccagcctgggcaacatattgaggccccatctctaaaaaaaaaaaaaaaaaagacagaaaagaaaattcaaaattatatccaactccagaatgccggatgagccctcagatgatgggactgagggtatttgggggagatggaggaggggctatacagcaggccacgggtcaaaatgcccccaaaggtccttcccagcatcttcactcttggggctctcctgctacacctctggagtcctttgccctctgtcccctgacagctaaagtcccatcagtttgcacaaaagcatggaggaggaaaaaaacaaacaaaaaaaaaacagtcgaggagtcctaaagccagctccgtgggtggagctctgcagatgcattctcagaactcaagatcgagtgaataaaaaaaaaaaaacagagttgaactgcagagggaactggcagaccttgaggagtagttccaggaggactgagccagagacacgggcctctgcgctgggctctagcaggagcaggacggtctgtggtttgggctctggccttgacctggggggcttgaccacagcaggccgtgatggaacccaacggctagctatcaggtgccgacctctggggactcctctggacacctccagggctggtgagcatcagactaatcctccagacccctctgccagcttgggagggtgagaacgccaaacttccagcttccccctttccctctagcattttccattcccctactctggtgtcttgggagagagaggctggaacaatatttgttcttgggcagaaactaggagcagatgagagaggtgtctctcctaacccactaaaggccaaacctcgatatgccctcttgaccccaggaggtggggagggcatgttcaggcccctctcctgccaccttcagtcatgtggtggctcatgtctgtgctgcagagtttgccttcatgtagccaacacttagatgggaaatcttattttcctcaaaggtaaactgagattggggcaggccatcggaggtttgcagtgactttactgatacaaagacgaaacagcaggggcctatgggggtcccagcctgagtacccccagaaaacagggctatcagagttaacaaataaaagcatagaatgctcagttaaatttgaagttcagataaacaacatatgcttttttagtataagtatagcccatgaaatagttgggatatacttatgctaaaaaatgttttgttgtttgtctgaaattgcagtgtaactgggcatgctattgttgtatctggcaacccctgttagaggagaggccatggggccaggcctgtgcgaaagtggtgggacctggctccacctacctggtgagggggctgctggtcttctgggtggctgcagctgtgaaagccaggcttgctgttgtggttgtccattctgagactgcagtttgtgtgcctaaacatacaaagcagaacacggttcaccccttccatggatggcccagctctggctgtggccctaaggcttctccacctaggaattaaggagcctctgccttggggtccaagactgtctggtcagcatccaaaatattacatgaattatcttctaaagagaagttactgaattattaccatgtgagaaattctgaggagcagactaaggagggaatttgcaatcatcagttgcatggcacagcttagcacactcgatagcattccgctctcctcgggctaggctagctcttttctgagtctcggccacagccgaggtgaactccttaccgcctgttctggagtgattcggcggctgagctggtggccccctcgctgagccacttctggagagccccggattcctggctctctgcagccaggcccagcgccctccacctccgctcttccctctctggccgtttcctgtcttccagcagcttcccaatctcaccctccctacccctgttgaagtctggctatgtctgatgcatcccagcctctgctgtgtgccaattcctgctggaccacaccctactcacgctgacggtgtgtgtagtgagttttgatattcaaagtttgcttcaggagcaatctaataataagagatcacagcatcatatttgtctttttatatcatttttctgggattaaatcaaggtataactgacacataataaactgtaaatatttaaagagaacaatatgttaaactctgatgtatgtgtatacccggtaacaccaccaccatgatcaggacagtcaacacattcataatccccatgcccgccctcccccttactctgtccccaggtgttagggactgaactgtggacccctaaaaattatatgttgatatgctagtccccagtacctcaaaatgtgactatatttggagataggacctttcaagaggcaattaagttaaaatgagtttgttagggtaagtcctaatgccatctgactggtatcgttctctgaagaggagatgaggacacacagggagacaccaaggcatgcgagcacagaggggcaaccgcaagaaggggtagcaagaaggcagccacctgcaagccagggagggaggcctcaggctcaactgaacctgccaacaccttgatctcggacttccagcctccagaactatgagaaatacgtttctgttgtttacgccacccagtctgtggtattttgttgtgacagccttagctaagggatgatccattttctcttactatctatgagttggcattttccagaatctaatataaatggaatcatacagtgtaaatcagcttttgagctggtttctttcactcagcataactattttatcattggtatatcagtagaacattcccttttattgcaagttgtattccattgcatgagtatttcactttttttttttttttttttttgagacagagtctctctctgtcactcaggttgcagtgcagtggcatgatcttggctcactgcaaccactgcctcccaggttcaagcaattctctgcctcaccctcccaagcatctgggactacaggttagtgccaccatagccagctaatttttttttatttttagtagagatggggttttgtcatgttggctaggctggtctcaaactcctagcctcaagtgatccacctgcctcagccttaacaaagtgctgggattacaggcgtgaaccaccacgcccagcctgtatttcacatttttaaaaaaatccactcacttgaattgtttccagttttttgctattacaaataaagctgctatgaacattcacatacaggtctctgtgtgaacataaaactttctattattttgactaaatatggaagtgctgaggggctggatcatctctggcgggcatacatttcatgtctgaagaaactgcaaactcttttcccaggtggttgcatcatgtgcattcccacctgcagggtatgagggctccaggtactcgagagtgtttccaacacttggtgtcaaggtcagtaatgttaacttttgttacaggccgaaagaatgagagtcatgaccaacacagtatagcactggaggctatatgagcgaacagaaaactgttctcatgaaagcaggatgttggaaaactggcaacggtgtctgctgcccgaaggggtgctgagggcagtcacaccccaagtgctgtgttccttgtgattatctataggaacatctgaagcctgttgtacaaagaaagctattgtgtgtacctgtaataaatcaagcagctgaccaaccattacctctccctcccttctctttctacctaataaatacgaagggctgtagaagctcagggcccttgttcactagaagcaaggagctccctgaccccttctttcaaaacagatctctttgtctttgtcttcatttctgcattcgtcccccctttgttcaatcccctagcaaccaacagcgacaagtggtggccgggacaggaacgtgagcaaagaaggtctgctggagcagagaaagagaaactgacaagacgaacgagaaaccctggaacaagtctgccggcagccaataaaaggtcagtgccctaaagaggtactgggagcggcagcagatacaagatcagtgccctaaagaggtactgggatatcaggtcagtgccctagagaggtactgggaatgggaagttttctgaataagggtaacatggggcagaatttgtctattgaggtgcaacattatgtgcatttgcttaaagttttacttaaacaaactggtgctcaggttagttctcaaacattaattaagatgctgaagaaggtcactatacataacccgtggtttccacagacaggcagtcttgatgtagaaatttgggacagagtaggaccaggattaaaacgggctcaccaaaaaggtcttaaatttgatctttttgttttttctgcttggagtttagtccgtgctgtcctcctgccattatcttcttcttattctgctagacagcaggaatcatattccaagtctaaaaatctgaaaaaatattttgtcccacccacagtaccaattaaaaataataaacaggagaaggaggatgaaaactggcctgtgtcaccccctccagtagcagaaacgtctgtactgcctccttcagtagcagaaatagagaccccaatacaaagaattttatgctctgctgctatagctggaaagcccttaggaccttgcgcttttcctatttccataaggcccgatccaaataatcctcagcagtttattcatgaacacaccccactacagtttaagttgctgaaggaattgaaagcgagtgtagttaataatggagtacaaagcccatttactttaggattgctagaatctatatttggtgctatgcgccttccaccctttgatgtaaagcatttggcttgcacttgtttgtctgctagtgcatacctgacatggaatttaaattggcaagaactgtgtgcagaccaggctagacagaatcatgctgctggacacggagacattacagaggatatgctgttaggtaatcgtccttattcagacctggaacatcacatggcactcccagacactgcttataagcagtgtgccttggctgctaaacatgcctgggccacaattcctgaggaaggggtcccagtacaatcttttttacatatcatgtaagggtggccaatgcacattttcttgcaagattacaagaggcggtgaagcatcagattcctcatactgcggctacagaaatgctaaccttaactctagcttttgagaatgcaaatgcagattgtaaatgtgcactggcatctgtgagatgtacaaaaaactcgggaaattttctcaaagcttgtcaagatgtgggaactgaacttcattgctctacaatgttggctcaagcaatggctaatttagtagtggacaaatctaaaaacggccaaggagcaaatcctaaaatgggaaaatgttataattgtggaaaaatcggacacttcaaaaaagaataccgtcagacctttgggcagaagggatcttataatgcagccccccaccccagaaaaaatgccaggactttgccctcattgcaatataggaaataactgggctagtcaatgccactcaaaatttcatcagaatggcacccccctgtcgggaaacgagaagggggcctggacccgggccctataaacaatggaggcattccctgtccagcccacagccccatctcagggataggttcccggaggcacattgattccctctccccaggaacacctggaagctcaggattcgatctcccagtcagagaacaggtaacgttagtgggaggagacaaacccaccaagattcccactggtatttggggacctttgccaacaggatatatgggattaattttgggtaaaagctgtcttaatttacagagcattaccttagtcccaggagttattgattctgattatgaaggagaaattcaagtagtggtaatgtcacaaggtctttgggtttttgaaccaggagaatatattgctcagctactgcttattacctgccagttacacccttctttacggaggttgggagttcgagaccagcctgaccaacatggagaaaccctgtctctactaaaaatacaaaattagctgggcatggtggtgcatgcctgtaatcccagctactcgggaggctaaggcaagagaatctctggaacccaggaggtggaggttgtggtgagccgagatcgtgccattgcactccagcccaggcaacaagagcgaaactccatctcaaaaaaaaaaaaattgatattatccggtcctgaactcaccaaagggccatctgagcctgaaattttcttcgtgagaagatggcaaatgacaaattctatttcattaaaagatatagagctattccagttatctatttcttcttgtgactggtagtttgtgcctttcaaggatgtttttccatttcatttaacttgttgaatatattggcataaaagttgtttacgacacatattcccttattattcttttagtagctataaaatctgttgtaatgttacctctctcatttctgatgttagtaatttatatctttttcctgatcagtctaggtagaggtttaacagtgtttctgatgttttcacagaaaacatatctcatttcattgatttttccctattacttttgttttcgatttcattaatttttcattgtggtcttaatattatctgtgttctgatgtttgctttgagtttactttgatcttttttttccctagtatcttgagctaaggccattgacttgaggcccttctccttttctgatacagggacttagtgctataaagaagttccaagaaggcactggcagggattggggtctctggttaccagggaagggggtccctttggcctgtgggctgaaactggaaccatcaccctgtcatctgtgggcaacagactcaggcactgagctgtgcagagaaaaaaaaaatgtgcctagaaagacttaatcccatcctggagggagccctgggagccatggggtcattaagagatcccctcaatcccaagcggtccttcagggtcctatgagacctgtcttagtctactttttcttgcttataacagaatatctggaattgagtcatttataaggaaaaggaatttgtttcttacagttatggaggctaagatgtccgaggttgaggagccacatcttgtgagggccttcttgatggcagggactctctgcagagtcccaaggtggctccaggcacctcgtggtggcggaactgagtatgctaagtcaggtctgtctgccttttcttataaagcagttccattcccatgataacccattcatcctttaatccacgaatggattaattcattcatgggaactctgcccccatgacccagtcaccttttaaaggccttgtctctcaatactgccacattggggattaagtttcaacacgagttttggagggacaaatattcaaaccatagcaagacctcaggactcagacaccctctgtcacaggtcactctgagtgacagttaatttactcaagtgggacctcagggaccaggacagagcaggacctgagagacacacacgtatatacactccctcttacctgggttaatggtcacttgaactttgaccccaagatcaattccaggtctctcagtcccacaccaataactgtcagcatcatctcttttgagattctccatggtcacggtgaacacgtggtttttctgattgtccctgatggaaactcgattcttctttacctcctgctctgatccatttgttttaacaaggatgttacagtaattccaatcagctccttgacaccgccacttcaagtaggtctcccagcctgagccataagcacactgcacagtcaatgagccctgctccgagccattcactgttgttggaccagtgattttagcggcaatggagtaacctggaaaacgcaaattcatgtgtcgtcacctcccaccccaagggcagggccacagcctcgtgcattgggagtagcagccaaatccaactgccttataacagtcaaggaagcaatacattttcctcaagacaaatctttgtccttcaaaattccactgggtcaaagtcaccaggaaaatcactgaagagcacaactgcagatccccaaagaaacacaaatgttggcattgagcaataatagcttcctgcagttcacccctctctctttccctatggccagcaaatctttatattccaaggaatgctctttggcaaccatctttgtgttatactggtctgatggggaggaaatggcagaaggcccttttccagaagaatgattgctgccttgatgcttggctgttcctagtggttctaatggtttctggtggctctgctgtagttaatcaccctgaatgaatccctttgaaatcaaccaaatagtgatgccaactggtctctatctgctatgggatccacatcacacagatctccatttcgccatacagtgttataaattccacttccaaaattcctaggaaaagctaacttttaagataaacacaagtaaaggttaggtataaacagagcagcacccattcaacacccttctgcatcttataagttcttctctaaacataatggacatgattcaagtcagttaaagggtgaggaacgggcatacctaattagctccacttttcaaacaatttgatccaggacaagactagtctccatgaacttgtcagcctaatctttcacttgaaaacaattcaaaacagtggaaataccttaagtgagagctttgccagaaattctttaaattcaactgacctaaagggagacccatctaaagaaacgattgattttgatgatttatgcactggcaataaaccatagctgtgattagtgcagcataaacttgagatggaactagaagcacattggagcacttgaagaagccctgggggcaattcctgtggcaggagagaggttgtctctgaaacgccaagagacacccaaggtcgtgggtaagagctcaggctgtgccagagtgcttgggtttgaatcctggctctaccactgataagttttgtgaacctgggcaaattaacctctctgtgtgatacggtttgtctgtgtcctcacccaaatctcatcttgaattgtagctcccataatttccacatgttgtggggggcaccagttgggagttaattgaatcatggggcggtttcccccacattgttctcgtggtagtgaataagtctcatgagagctgatggttttataatgggaaacctctttcacttggctctcattctctctcttgcctgctgccatataatacatgcctttcaccttccaccatgattgtgaggcctccccagtcatgtggaactgtgagtccattaaacctctttttctgtgtaatttactcagtctcgggtatgtccttatcagcagcgtgaaaatggactaatacactgtgacttcgttttctataagtgggaatagtaatggcatctacctctatgttactatattatgtttgttattattattattattattattacccctggatgaatgaaaactttagacttcattggaatgtcttgaaaaaccagggtcaccatggtgggagcggaagacaatttcaccataaacaggcagagctccacaacccaaggaattcctggaacagaaattggactccatgcccaaatctgctttctatggcatctgaagggaactaagaaactacacacgacctcctggggaaagatgggtataggggcttcatttgttcactctgaaaaaagttctacatcagaatggaaagacaacaattaaggtaaatatttaaagaaaaactacatctggaagttatttataagaaataagagctgggtgtggtagctcacacttgtaatataacaactttgggaggctgaggcaggagaatcgcgtgagccctggagcttgagagcagccctggcaacatagcgagactaaataaataaataaatattagctgggtgtcgcaccacatgcctgtagtcccagctactcactcaggaggctgaggtgggaggatggcttgagcctgggaggtcaaggctgcagtgaaccctgatcccagcactgtactccagattgggtgacagagcacaccctgtctcagaaggaaggaaaggaaggagaatatatctgaaaattgtttacagaatataaatttgaagccaggcatggtggctcacacctataatcccagcactttgggaggccaaagtgggaggatcacttgagcccaggagtttgagaccagcctgggcatgaaagtgagtcctcatctctacaaaaaaaaaaaaaataaaaataataataataataataataatctattttaaaagaaaataaatttgagattggaaggaaaaattttcttacaaagcttgatctgagtatagataatatgagaagcacatagatttgttacattttaacagaaatgaaaacactacgtatcaaaatttgttgacatgacagccaaagctgtactcaaatataaatccttgggaaaaaggtttgatgcttcctcaaaaagttaaacatagaattaacataggattcagccattttacccctagatatatacccaagagaactgaaaacatatctccatacaaaactgtgctatgaaagttcataacattattactaacaatttttaaaaggtagaaacaaccctaaggttcattgacaaatgactggagaaaccaaatgtggtatatccactgtgaaatactatgcagccatgaaaaagaatgaagctttgatttgtgctacaacacaaagtaaccttgaaacatcatgctaagtgaaagaagcactccagcctgggtgacagagcgagacaccagctcaaaaaaaaaaaaaaaaaaaagttcttcaagaatggactcactcattagttccttccttcattgatatctgttcattcatctgtttatatggaacagtcagggttgagaaccactgttccaacaagaagctatacttgttttgttttgtgtgtgtttgtttctgcagcatctaacacagaacctgtcagataacaaaaacttgattgctatttaatgaatatgggcatggatggatgaattggcgctgtcattttccctgacatgtctccttcctgagaacagagcgtctctgtctccaagccagccgctgtcattccagtgccttaaagctccagccacactcacctgggaggatgagaagcagcagagatggggacagccacatggtcctgtctcctctcctctccttggtgatcacaggtgtctggtgcccttcagggacttgaatccaagctcggaagtcaacaccgcaaacctactcgaatctccttcaagtctcttgctcacttcctgttacatctgtagctacttctctttttacatattaggagaaaagaggtgtcattctttgaaaagactaaggtacagtgtatgttgcaaggtgtgcccaaacttttgtgcatgtggaaaagaaaatgtgtccgggactggtcaggtttgcacgggagtgcacgtaggagccaaggagcaggaggagccaggaggaacccaagcattgaggagctgcgggatctactgcctggaggagaggacggacaaggccagccatgaggagtgcagggagaggagcactttgggaagaccacagtgcacaggactcacacccagccttgctggagaaagcccatgccccaggcttcttccaggcagccccactgtaagacatctcattgcctcttcctgccctgggctgtctgacccactgccccttcccccaggaacacttccactgggatcatgagtcactctgaagccactctgaaatcactctgaagccaaagctgggctcagtggggaaggtcaggaatggagaaattgccttttctcgttagcctcctcttgccctgatttcatcctccctatccctgcacactttcccctggctgctgttgtaatctacttgttctgctgacgcccgaactgacttctttcccggtctctccccactttctttagatggtcccttccctctttctctccctttccctcctgaatcgattcattttttctctcctgttttatattttccatatctgtgggctttgttctacatttggggagctttttatattgtttatttcatgcttgtactttcccttccaatccttggatcaaatattgattttagagactgtatttttatttcgaaaagtttttttggttctttgattactgatgttttcaaactctcttctgttccttgaactatatccctccactcagtggtcacatctttgttttgttgtctgcttcttctatattatgagccttcctcaagtgtctgctgattcttggttatccaatcatagttgagaacaagataaagtgtagctaactgagacctcagagtatgtaggagtaaatagtatataaaatagctctggtggctcatgcctgtaatccagcactttgggaggccaaggcggacagaccacctgaggtcaggagttcgaaaccagcctggccaacatggagaaaccccatctctactaaaaatacaaaaattagccaggtggtggcacacgcctgtaatcccagctactcaggaggctgaggcaggagaatcgcctgaacctgggaggtggagattgcagtgagcccagattgcaccactgctctctagcctgggcaaaaaaactagttccaaaaaagacacttgtacacgcatgtttatagcagcacaatttgcgattgaaaacatagggaaccagcctaaatgcccatcaagcaatgagtggataaagacaatgcggtgtacatatacaccatggaatactattcagccacaaaaaggaacaaaataatggcattcacagcaacctggatggagttggagatcattattctaagtgaaataactcaggaatggagaaccaaatattgtacatcctcacttataagtgggagctgcgctatgaagatacaaaggcacaagaatgatacaatggattttggggacttaggggaaaggatgcaggggatgagggataaaaaaccatacattgggtacagtgtacactgctccagtgaagggtgcaccaaaatctcagaagtcactgctaaagaccttatccttgtaaccaaaagccatctgctccccaaaaactattgaaataaaataaaatataaaaagaaagagaaagaaaagaaaatagttccaatttatcatgccaaattgtttgaacccttgattctttcttgacttacaagctacactttaaggggcgtgggcagagagcggtcttctaaactctagactgaagaggattgaagttgagctccagcattctcactgccatggcttcccagatattacattaaaataaagaattcctgctcttttgcctgggggtcagtgcctgcctccaggcatttggggtatatgtaaagatgtacatgtttggccgggcacagtggctcacatctataatcccagcactttggggggtcgaggcgcgtggatcacctgaggtcaggagttcaagaccagcctggccaacatagtgaaaccccgtctctaccaaaaaatacaaaaattagcccagcatggcagcgcacgcctgtaattccagctacttgggaggctgaggcaggagaatcacttgaacctgggaggcggatgttgcagtgagccgagatcacaccattgcacttcagccggggtgacagagtgagactccatctcaaaaacaaaacaaaacaaaacaaaaacatgtttgtggaactgctccatgaacaaagctccaattgggtccccagtctccattcccacttctgacccacactcttcatcacacctgctggctctgagttcaaagcctcccctgagttttatcaggtgggtcaattagaagtaggagttgcaaaatgcaatttattttatctgccctttactctgagggtacacccaatatgccccagaccaccatacccctaatcttttgacacggcaggcccctaaaccagtgtagggtttatctcccagcctctggagcacatccagttgctagcctcttcttgttatcaggtgcaattagcatgatgtcataaacacaggggactacctttatgttctgggcaatggctggacgattcaggtttcttagaacaatactacaaggagaagaaaattaacacagtcctggaacaagactgtgaaagtatactgttgtccatgccaagcgaatgcgcctgcctctgttcctccttcctgatggtggcggaaaggatgcttttgccagatcaacagtcacacacaacacaccaggttatgctcatctattctagtaaacctgtcactgttggcacagaagctggaaatttggctattcctttaatatggtggtgggtttgttgttgttttgttttgttttgttttgttttgttttgttttgttttgttttgttttggagacagggtctcactctgttgcccaagctggagtgcagtggcacaatcatagctagctcactgcagcctccaactcctgagcttcagtgatcctcttgcctcagccgagtagctgacactacagttgtgcaacattgcactggctaattttttaaaacacttttcggtaaagaaaggatcttgctctgttgcctaggctagcctcaatctcctgggctcaagtgatcctcctgcctcagccttgcaaagtgctgggattacaggtgtgagccaccatgcccaggctcttggtttagttttccctagcccattgaccttggtaaattaaaggcagatctagtgggaccatgccttgttttctttgtcttggggggtggcactgatctctgtgttcctggcagaatgtgatattgtttgggatttactatcttggccacagcagagggacagcctcagcggcttccccttggccttccccagtctgatcacttttaccacacagaccagagagtcagtattcatatgcactggttgctaagtgtatccacttctatcatttctaaaaatcagggcaagaaccactgggatgcctctctcatctctaggatcttgattttgcctctggttctactcaggactcgctgcctggtccaagtgctcagcttgtctcagactgcccagtgactccacctgccctcttcccttctggaattctctcagccccattgctcctatggagctcagttatgtaatggcatctcctcccgtgagcctggcctacagagacagccactgctgagcttctccataatgctaatgccccatcaccaacatagttcttatttccctggtattggagtatcctccagggcatcccaaggataacactcattaaatactaatttagtgaaactagcatattttacctaaaaacacaatcaaataatttcatgtgagtctttttaaaaacaaccttgtttttttatagcagttttaggctcacagcaaaattgagcaggaagtacagagatttcccatgtacctcctaccctcacacaggcacagcctcccccattatcaacatcccccaccagagtgggacatctgttacaattggggaatctatattgacacaccatgaccatttgaagtccatgtttgcattagggttcaatcttagtgttgcatattctatgggtttggacaaatggatgatgagagcatcctatagagtaggttcactgccttgaagatgctctgtgtttccttgagccttttgatcccttcttccacccttccatgacatctttacatcattgaatgtggggttttgttgcttctaagcttctcagggccatcccagcagtgtactaggaccagtctcccagctttgcaagtggtgagtcctcctacattgcatggatgagtacctctatgttgaaaaacccttcctggctcagcactatagtccactgccctgggatccactctcacacacactcttctaactggttcatgccagcgtatattagttctccttttcccttagcagcccagcgtgtccctaggtgggccaggctgacactcaacgttggttatcggtcaggaagagaaatgagggcagattcctcaagtagatccttagggggcagcaatgtctggtgaggcatctgcttcattggagacctcagcatcaacttcaacaggggagctgttaccttctaacaagcatcaggccgctctgcagtgggaggctcgagggctcaaatgaattgtcaaatgtcccatcttcaggttcctacttttccctacaggagcctgacttgttgaggctaaggattgagttttcactgaaatttcacttctcttaaacttaggtcttggcctgtgtattagtccgttcttatgttgccaaaagagacatacccgaggctgggtaatttataaatgaaagaggtttaatggactcacagttccacatggctggagaggcctcacaatcatggcagaaggcaaatgaggagcaaagtcacgtcttaaatggcagcaggcaagagagcttgtgcaggggaactcccctttataaaaccatcagaactcatgaggcttattcactattgcaagaacagtatggaaaaccccgcacccattattcaattacctcccactgggtccctcctggtggggattatgggagctacaattcaaatgagatttgggtggggacacagccaaaccatatcagcctgatctacggcacaattttttctccagatagagggaatggggatcccttcaaaagctgctaaggagggtaccagaagcccgccaaaggcatggtctaaaatgttcacagcacactatgcatcatggccctgaacttgaaactagctgaatgcccataaataatacatttgaaaaaatcataaaaacaacaagaaaagtgtttcaaattgtgcactttaaatatgtgcagtttattttatcccaattataccttaataaaactgggaaggaaggaaggaaggaaggaaggaaggaaggaaggaaggaaggaaggaaggaaagaaggaagaaagaaagtctgtctatggtccctgaagtcctgccccctcccatgcgttcttggctctaggcagcagcaccagggctcaccaagacactccaaaatcccaagagaaggtgcagcttcaaacataaacagaaggcccggatcacacctgtaatcccagcactttgggaggccaaggcaggcagatcacttgagtccaggagttcaagaccagcctggccaacatggcaaaaccccgtctctactaaacatacaaaaattagtctggtgtggtggcacatgcctgtagtcccagctactcgggaggctgaggcaggagaattgcttgaacccaggaggcggaagttacagtgagccaagatcacaccactgcactccagcctgggtgatagagcaagactctgtctcaaaaataaataaataaacaaacataaacagatattgctcaggggcctcctccacttcctccccaagaactgacccaccacgccctcctctgctcccactggcaaagctttctgctgctctgcctctaatcccccacccctgcaaagccctttgcaggtgaagatatgatgggctttgtcttaggaaggctaaactgacagggggttaaggagggaacacagcagggagtcgggaagccccagggccatggaccaggcacagtaatagaccaatcttagagtgaagaggacacggaatttaattttgagcacatctgagctgttaacaaagtgggtatctctatgaaacaaccaataggcactggaaatgacagccaagcactgaggcaggaaatcaggtgacaaactgcttttgacagtcttgtgcatagaggtgactttagagtgcaggtgaggacactccctggagagaagggctccagaggagagcatcaggacaggctcctgcagatgcagggtggtgggggcaggaatggattaggcagtgagagcaaggaggggcttcagcaaagaaggaggagaggaagagggagcaggtgacagaggagggaggggaccatctaaaggaagaggggggagtctgggaaagtcactttggggatcaacagagcaagcagtttcggtgcagtgagattggccaaaagccaactgcagggaaaatgtgcagagatggggaggaaggaaccagggcaaagtggggctagagaaaaaaggcaacttccccttccccaactacctaccacaagcctccagtttggagtgactcaggaccccagaggaagctttcctagagaggagcactgagtcaggctccagaagagataacagcccagggctggaagggtggtttgagatgccctgccgtggggctgcctggaaagagcctggggcacaggctgtttctccagcgaggctggatgggagcactgtgctgtgttcttcccaaagtgcaaagccagcgcgcctcgatcaatcccttccctccacgctctgagacaaagccagggcgcctccatcaatcccttccctctacgctctgaggcaaagccagcgtgcctccatcaatcccttccgtccacgctctgagccttactgtactccctgccctgtgttgttggcagatgctcctaaatcacagacagctgcagatggagcccaggccaggcctggaccatttacttccccagttcattgaagacgtatcatcacaccacacacactccaaaaagacagcaccacgtttctcttaattcatgaatttaggaagtaactaaagaaaaaaaaaggaagcagttgagaaaacaaacaaaaaaaatgatttagacaagtaggaagcagtttgcctctgggttcagttacaagttgctggagggcagctggtattaactcatcaccagggagagagcacagacaggcaggggcatgtagtgctcactggtcctgttccttctcatccttccaggtaagtgggcctggggattaaggaactggaacccaaaaggctgggcaggaaacagagagggtctgtgctggagggaaggagacaagctggggaaaatgcactcatccatgcacttacatataagaaagcaggaaggaaggaaaagagaaaaaaagggaggaatgttttgttatctgacagttactaggttaggtgttggggaaagaaacaaaaaacataaatggtgtcaggtttctaggattctgattcttctcaaccctggcagatgatagatagatagatagatagatagatagatagatagatagatagataattgatagacagacagatagatgatagatgatagatagatgatagatagatagatagatagatagatagatagatagatagatagatagatagatgagagagaagtaaatggatggatgatagacgagagacagatagatgcatggacaggtggacagatagatgaaagaacagataaataggtagatacatacatacttatatacttgcacatatacacatatacccaaacttaaatgcatgaatccctgaggaactttaaaagagcacaaatactcaggttccagctcagacccacgcagtcgtggcggggttcagacatctggctagtttagaagcctccacagcttgtcatgagttgtagctaaaatggagcagctcagagttacagggaggaagacaggcaataaggcaaggatgtcatcgctctctggaatgtaagtcaaccccacacatcagcctgcttgagcttctgctctggacgagccaaagaccagaccattgttcaaggttgtaagtacaacaactgagacagatacaaagtggtctggtggcaccagggcggggctgaaccaacccttcagggaggggaataagggcttaagtccatcaagcaaggaagagacaacttcctgggcaaagggagcaacttgtgcaaaggtatggagacaaaaatagcatggtgcttaggcaaagaaaaacaactgtgcactgagtgtgtgcacaggtgtgtgagtgttgggggtgtgtgtgtgtgtgggggtgtgggtgtgtttggttccatgaaactttatcacatgtgcagactcacaggagagggtttttaggggtgtggggtgcagtgccagtgggcggaggagttgggggaagccaggatgtctacctgttcagctctgggattttaaaataaatcggtggctggccgggcgcggtggctcatacctgtaatcccagcactttgggaggccgaggagggcagatcacctgaggtcgggagttcaagatcagcctgaccaacatggagaaaccctgtctctactaaaaatacaaaattagtcgggcgtggtggcgcatgcctgtaatcccagctactcgggaggctgaggcaggaggattgcttgaacccagaaggcggaggttgcggtgagccgagatcgcaccattgcactccagcctgggcaacaagagcaaaactccgtctccaaataaatacataaatacataaataaataaaataaactggtggctgcagtgagagccagggattggtggggaagtgggtgtcacctcagggcaaaggagggaaggtttccaaaatgagagggtgttcagtggtcgctaggatggcgcatgaacagaccactgtgttgggcagttggagccctcaggagaactttgtcagaggggtgacaacaaaagaaatactgccggggaattaaggaacaaatggatgtgagaatttgacaatttgggggctgaggataaaggctcctggttggtccccagggaggtgccggaagccctgggcagtgcccagggagggaagatctggacgttgggttctgtcttccagagtatttctccatctatggtcctagagctgtgtggggcacagaatgggactcactgacagtgcagtgtcattatgaccaaggctgggagacctacagcaagtagtggtgccacgggaaggactggcagtcctgcaaaatcctcattacaatcacaggatcagagcagacagcggagagagaccgagtgtccatcagggacgatcagaaacatataccctaaaacttaaagtataataataataaaatttaaaaaaagaaaagaaaagaaaaaccgtgtgttcaccataaccatgaagatgctctggaggtccgacactgacacctactggtgtgggattgagaggacaggcactgaccttggggtccaagttgaagtgaccatttacccaggtcggagcagctccctcctgtaccaaactctggtgctgacccgagaggattcagtgatgctgtcttgacattgtcctgggactacgtgtgtgcatgggcttgtgtgtgcttgtgtgtgcctgtgtatgtgtgcctgggcttgcccgtgtctatatgtgtgctgtgcatagatgtatgtgtacgaatgggcccgtgtgtgtctgtgtgtacatgtctgtgtttgtgggcctatgtgtgtgcatgtgcatgtgtgtgtgtttggggggaggggttacaccaagattctggaaagactggaagacagagcaagcctcagtatctctgtatgtctctatctgctattatcagagggagccaagcagaactgggtcagcttgggcaggcacagtgcagggtaagaaagaaggcaggttctcttctgcaagtcacttggggcaacccgtgccccctcagagcagccccagcctgacgggaggacttgtcaggtgtacagggaggggaatgcaagaaaatcgcaatcccagaagtctcagctccaggacaagcatgtagtgaccaagagcccattggtgaccctctccttggagccacctctctctcgtcctctcccacctctggtgacatatggacaaaggaaggcatgggagactctgacccattcctgaaagagggaaaaacagaacccggcatagtgcagagccctcccacaggcctcccctggctgccccgagcctttgaggatactgagaactcacaacagggggctcctagaaagagagtccggctgtcatcctcactccacagcccagcccccagagccatcagtgtcatctccgccgtgggcaccagagaaactgtcagctccccatgcacatgcatagatgctgcagctcaatcatatatctgttacttgtgggcccatttacaaggcagggaaaagtccttttcagcttagtatatgcggatgtggtgtgcctgtgtgtgtgtgcagtggggaagtctggttttagaatgtttcagaaattgacttaaaaagagaacaaaggcatgagtggaaggaaaggaggagctgggggagagtcggaggctgcaaccctccaagcctagtgaaataaggaagctttggggaggcaggaaaacttcagctggaaacagatgctctgcccagctgcaggggagaggagtcctgagtccccaggcagggcccagggaggggcagctggctctgagggtcactttgctacacagcaggcaacaaacagcctgctggagcccaggctgagactcaagagaagggctggctggctctgatgtagaacttcagggaagcagagtgtggttctcaacgctcagctgtgcaacgcaggactctgggactaagttgaatatttgtaaattgcctgcatagcttctcgccacaagtccttcccaggtggtgcagtgatgtttgtttgtaagtgaaataatattacattttaggtaagataccaaaaagatacaaaacaaaacaactgtagtgctaagactaaatgcttcacgatccttggaggggtaagaggtgacgtgagccacggggaagccacctaggtcaccctcaaaactatcctttgcatgtcccacagcaactccaagaaaacaatctgaacctaagacaacagacgcagctgcacctgggacagcagacacagctgggcctgggacaatggacacagctgtacctagaaaagcagaaacagctgtgcctgggaaaaggaacacagctgtgcctggaacagcagacccagcttcacctgggacagcagacacagcagaacctatgagaacaaccactccaacagttctggcctcctggccttctctcacccagagcaccaacagcacccagcccacggctcttaccagccccctcaccaggtgagcagagctgggctcccacagacctttccctaggctgccccatgactgctccttcagatgctctcaccagggaccctcatgtggcgctcgtcaggggagaaacagtgaagtctgtagtgggccttcccctccctgtctacacctgagcactgcaggagattctccctgatgagctgcaacaggctgagctccagagagcaggctctgggctccatgcttcaccgagtccctcaagccccaggaggcaaaagcgaggtgaagctttgggtgctctggaagggcagctgtctgggtggctttcctgtggctgctgtaactgatcgttacaaactttgtggcttaaaacaacacagtctcatgatcatacagctgtggagaccagaagtctgaaatgggtctcactgggctgaaatcaaggtgttaacagggctggttccttctagaggctccagcggagggcctgttcccttgccttttccagcttctggaggccacccgtgttccttggctcatggccccctcctacccaaagccagcaaaggtcggtggagtctcccacagagcatcgctccactgtctctcctgcctccctctttcatttataaggacgctggtgattccactgggctcagccagatgatccaggataatccaccctgggtcacctgacgagcagtctcaaatccacccactgccttaattcccccttgcatgtaataaaacatattcacaggctttggggttatgacatcgtgggtggggttcactattctgcctaccacagtcacaggcaggggtgtgcccatcgctccaactctccagccaaggctagggaagggcagggcgggagagcgggaagctgggcctcttgcttttctttcacattcccagcatggtagatgggtgtggacatcaatccgaagcccacctcctttcgagggatcaataggatgtctcatcaccgcgcaaatgcggctgcccctgtttaaccccatcacagcctggtgcttcaggatccctcaaagtccagggtcaaggcccattctctccctggatcctgccttccctgctccaccggctcccttctccagcccaactccgttcctttcaaagggtcttgttccctggagcctgccagcaccgatcctgtgttccctaggagtccggaagaggcgaggcactggggatgcttcctgacctggccttcgtctcgctccactgtttgcagagcggttgttctgctgagtggggatggcagtgccaggacttctagcgagacgggagaggcacaaggggaaacttggcgggaagagaccaagggtgcggcggctccacggggagtggaacttgcaagaagaacacagtggtttaaagggtatttttaggatgtgcaatatggcaggcctgctctcactcaagaaaactctgagttaaattcacatgactcatcactgcttccatgccctgggctggaggccagcttcggggagagaacagggatggcctgagggaaagggccctggcactgggtgtaggggagtggatgaggaataagactggggaatcagactcttacacgctgatggggactccccagaacccactcgtttagctagaccaaatattaaacatgtgggtgatatgaggcagcaggtctcagatctgctgtcataaagtgggtccaagcaggaggagacccctcccaggagaaccaaatagataaatagccaggttgttagaagtgggggaatcttcctgtgcttcaaagaggtaataataattagatttgagcttgaaagatgggcagaagtgacaaagggagacacaaggcagagagaggagcagaagcaggaatacaggacacagcagaccctcgagcttggcgggacacaggtgagtagcagggactgtgggaaagaagaccaaaggcaggcctggctgggtgcagtggctcacgcctgtcatctcagcactttgggaggccaaggcaggaggatggcttgagctcagtagttcaaaatcagcctggggtatatagcgagacgccatctcggcaaataatgttaaaggctgggcagtcacggccaagggcagcgaaggggccgggccccagactgagcctgtgggaaggccactggaagctcagcctccgggtggcatgactttgccccttgcatggggcttccctggttggggaccaggcagctgaccagggtggcaggtgttggctcagggaagaggctgctcactcttggcatcttgacccctttgtccaggatcctgctctgcaacatccacttcctgctcccgatctccctgaaggggctgctgctcgtgggcctgctctgcactgtgctgcaagtgagcagtgctaagggggcctccagggggaaataaagtcacagcctgagccggggaaccgcagctcccacaccatcaacaccctcggagggggcaagcagaacctctggcctcctatcaggtaataagcagcaattgcagttccccaggagacaagggtccctgcagagatgaaatatccctcatcctggcctcaggaaggcaatcccactcccagctggctctgcacagcacagggatgctgacggggcctctctgccttctgccacctctgcctcaggagcagataaaagaaaggacatcccccttgcacactgattccttggaggcatctgcatctcaccttcatggatcctccctcaggcctcctttccttgtggctccaggatgaccctgtcagagatactggactatcgttcagttgcagaggccccagggcctgtctggacttttccatcccaagaggggctcggctctatcccctttgtgcctgtgaccctctccatcccccacccggctcagaactggcacagccaccaccaaccactcctgattcaacccaagcttcgccctttccacctctcgagctgtgcaacaacaaatgcaggatgctcagccctcatgtgtcagtcccctcaattcacttgtaattaaataacaacacacctctttttctaattttcaaaggtgtatatatttcccctcaataaagttgttaggattatttttctcttccacttacattcttcctgaactctgcctgctcttttttcttccatattttactttaaatacttttttttgaattactatatttcttttcttagctcctttttttggagagatcttgttgtcttaacttctctaagaaggaggggaattttccatctgaactcttcctctattgccttgagcacttcctctcctgagacgggttcttcaactgccatttgctagtgttcatttcttctccttgatctcatcagctgtgaacaggtgctggtgtgctttataacttttctctgaatgaggttgaagattggccaagagtagtgtcaggagccatggaggcagagccatggagggcagagcatggagggcagagtgtggaaggcagagccatggagggcagagggtggagggcaatgtggagggcagaccgtggaaggcagagccatggagggcagagcatggagggctattgacacagtggaaagtttgttttcgggaacactcaccacttgccacatcttgactacctgtgtccatatggttcatgtgttgagaaagggcaagacctcaggctccagcagcctgcatgctgctaagcataagagaacagcctgtgttgttgcaatgtgaaccatggtcacacaggctggttgctattgtcatctggaggcttcttcacccacgagtctggagcatgggctggggtgatccaagacagctctgctgggactgttgcccagagaccctacatgtggcctctctgtgacagctgggttctaaaagggaatatctgcagaccttccagagggcaagcgtttcaatagactgaagagggagctgcagggtttcttctgacttagccttggaagccatacggaggccctcttgcattccccatgggggcaaatattggttcttgcagggtggaaaaatatttttactctttctagatacaaaacagagatatagatggatggatggatagatagatagataggtagatagatagataggtaggtaggtagatagatagatagatagatagatagatagatagatagatagacaggtgaatggatggatgtacaatacatctttggtattaacatttcatgaggggagatatttagggatattctttttttagggatattcattgttatcttaggataacaatgaaaaaatgttgagaaacactgttctagtccacaagttgaaacagtcacaacccagccagacccaaggggaggggacctaagccacaactcttcatggaaggagtatcaagaaatttgcagccatgtttttaaactgccttgtggaagaatcataatgtagcgccttcatgtcacatataagaatagcgggacgtgaaggggtgaagccacctggtccccagtcacaaggccagagagcagagttgattctgcctctgaatggcagcctggagctggcccacacagcatccctgcaggcccatctgtgcactttagaaggtcacttcccaagcctgctgggggcaccatatggtcccaagaataaaaatgaggccctgaaacacctatcctttactcagaggtcacagtccagcagccattacttgcacagacatgtcttgtttgggttcagtgggtgaatggttaaacaaattattttacacccatgcaatgaaatcctgctgagcaataggaaggaatcagctattggttgtggtaagtgcaaccacttgtatggatctcaaggctcagtgaattaaaaagtcaatctcaaaatattacatactgcataatttcatttgtcctcaaaaggatgacactgtagagatggagaacagattagtggtttccaggggacaggaatgggataagggtgcaaatacaagggacagcatgagggagatccttgtgatgatggattggttctgtattttgacgggggtggtagttacctggatctgtaaaattgcatggaactctacacaaacatatccataaaccaatgtatgttaaaaacggtgaaaactgaacaaagtctgcagtctagctaacagtattgtaacaatgctggtttcctggtttgggtcttgtcctacagttatataatacatcaccattgaaagacactagatgaaggattcacaggactctatgttatatttgcaatgttaagcctataatcatttcaaaataaaagtttcaaaaattaaaacctccaggggctccctatggcctccagaacacaattcaaacttcttggtctgccatgaagccctttcagactgaggctccagccccatatctcactcctccctcacatgcactctgcacacatggtaatggtaacgtagctcctgaaggtcctggtatccaccatgctctatgactcttccctaccattgtctgggacaatcatcccccagtcttctgccctatttttataactcaagccctcaattttccttctccgcttggccctcatgggagtgcctcccttctgtgcccccacagagcactgtgcagaaccctgacacaaattctaacacaccgcatcgctattgttagtctacatcttagacttcccttctaaaggagtagggactctgcatagtttaagtccttatctgtaatgcccagaacaatgcaccatagacacacaataaaagtttattgaatgaatgagtaaataaagggaaaaaagaaaggaagaataggggaaaaaaagggagtaagggagaagggaaaattcaaagcatggagaagccactgtttgtttctcctgcacctgctgtctgccatctgtctactctttcttaactcttctcttctggcttctgctgtcattgctctgttgatctgctcttctgaacttcattagtgaccttgtgaatgataagttcaatagcctcctctcaatcccggtcctcctccacctctctagctctgctctcctccttgaaacattcatggctcttgacttctcatcttccacctgtttgattctgctccagcaccttgatcaatgtcttcctcctaccctttgtctttaaatgcaggtgccccgagggctctgtccttggttctgaactcttccctccatgttttcacttcttgctgggttccagttaatctctctacacacattcctctccagccctcaacactctgctaacccacatctctagctatctgctagacctctctgcctgatgattccaaacacacagaaaactaagctctgcatcatccaagcctgctcttgactttcctacttctgtcaatgatgcccgattcctctggttttccaggcttaagactccggactcccagattcttcctttcagactttgctacatctgctaggcaagtcctcctaaagcacatctgcaatcccatcttgttctgctcaaatccatcccaccatagctaatcaaagtttaagtaagagttgagtcctaagcctcctgaacctgccaccacctgagttcttctagattagttccatctggcctgccacaggaaaatttcactccattggaatcttagacacatcctaccatgagcatctgtatgtgaacagtacagtccatttgctgataggtcttctataagtgactattgttatgaagattatttcccgcctctctgctttcacttatgctgtttctctgtcctctctctctccctgttgctccatccctgctccgctgaaatcctatacctccttcaacatcaacatgaatgtcaccttctttccctgacctggccagcttggcatgatattctcctcaccaaccccctgacatcaggaagcatctcttgtggctctagagttcttcctatgctgtaatgacttgggagcttatccttctcataaaatgaatcataagctcctttcttgctcatcatcatatttcccgggttaatataattaatatgggccttgttagattgaatttctctttcagcatgagtcctgggccagccccatctttcccctagtcaccatgcatgatggagctgggagccccaccagagctcaagttcagagcacggcagctctgcctaagcactcggcactcagagggtcactccatgtgctctggacactggcatcactagctcaggatgagctcaggcctgggggcagagggggagcactggtccagatgtaggtagcaagtggagatggtgatgcttgcttgtggcagactgtgggagtcctccccacaaactttagggaaacagagtaattgacaaacattcagaaaaccaactgagctcattcccgagccaggggtcaccagtagtggtgatagcactgtgcacttcaagtgtggacaagtatccttcacctctgtgccctccatcctgtctttgaaaaacgatatctgctctgcctgtggaaaaggttaattgctaacaggtggtctcagccagacttctaaagtggacagaactgactctgttgaccttgtgcattggacacctccaggtgggggaattccaggagtgatatcaggggcacccaccagctccttctccctttactgtttcaactcgccccagaactttaacctggagcagctcatccacggcccacccaggcagagatgttctgagcccagccacacactgcctggttacagggagagaaggggccttaaagccagggagacccaaggggcgtcagaagacgagaggagccctgagcatgtgggacactgggcaactgcatgagcaagctctgccgggaccaagctcccttggggttgtcccagagaagagatggagctctgtgagcctaaaggctggggctgtgaggggtgtgtcctcagggagactcctgtctgcaggaaggaggtagttattgccctgggggaaactggcctgagaagcatttgtgccaagaagaatgaagggccaggctcctccagaaaattttttccctcccttcctccgtccttttctctctctctctctctctctcgctctctctctctctctctctctgtctctctctctctctctctctctctctctctgagacagggctctctatgttgcccaggctggcctggaactcttacgttcagccgatcctcctgcctcagcctcctgagctgggattataggcactcgctatggtgcccggccaacttccagggaattcttgcccttgggaagtgggcatgagggcagggaggcaggggactggggaggagaaaggaggacccccaagctgcacattgaggactccagaggagtgtcctctaagagccaggaccctcctttgaggcacaggaacaataaatccctccagagtccacaggtctctcgcatccagtctgaaaggttgactccctgcacggggcactcctggggatggggctctgcagggcttcgggtcagcctggctctatcttccaggaggagcccactgaggcctgttcacccagaagacagcacccagcatgctcaggagcaggggcagcttcagaaggaccacgagcaggaagtgagggctgctgagccggaacctgtggtggacacggtgaaaatgagtcacttccccgggagaacccccaggacccttctctccccacctctccccatgctctgactctggagcccaaataacccaggagcagccagggaaaggacctatgccagggcagccccttctgtggcccccatccctccttctccctccatcaaggactgcccggggggtctcatcaaggagaggtgatggagtgaagacagaagagggacccacttccaggagtgcgctccacagcaccctctctgtccctgtcccactcacagcctccactttatcaactgacttcttaaaaccagtccccactctcgctttttttattttctgagacagagtctcactctgtcacccaggctggagtgcagtggtgcaatcatggctcactgcagccttgacttcctgggctcaagtgattctcccacctcagcctcctgagtagctgggactacaggcgcaccaccacacctggctaattttgtatttcgtagtagagacagggtttcaccatgttgcccaggctggtctcaatctcctggactcaagtgatccaccgcctcggcctcccaaactgttgggattgcaggcgtgagccaccacacccggccaccactctcactgttccactccagctccttgttccctcccctcagggtctagcagcaatatcacagccctttctggatatctttgggagaggagagagaactgattcaaaccccagcctggagctggcccatctccccacagaccccacagacagctcctggtggcaaaatccccagctgagcaaagacctttgaaaagggccacagaactgggaccccaagtccggagctggatggggaaggagacaggaaggagtggggaagggaggaggggctgcacgtccacctgaactcaaccttcgacctgagtcccagtagctgccccatagggaaaggcgttcacagcacaagtgatatttcccactcagcatccacatgcagcctcagagagtatgagaatcaggaccagagatggagagaaacagcagacagtgacgatctcaggtcacggtgcgccacccccaccccccagcttccaccccagggttgctccctccatggcctccaggccctgcgtgcttaccctgaattttgggtcaacacctccccggtgctgaggtttcgcccagggttcaccaccaggaagatgggaggtgtggctggatgtgtggtcctccttggggttgtaattgctgttggagatgaaaatgatgcatcagccgtgcctgggctcccagccatgcacagaacacccgtatggatgtcatacagaatcacccactcacagaagaggctggaaagatcttctgaagccagatccagggcacctcctgggtgaaacccctcagggacaaaaagagcccttaccagaaccagccatgagagtcccctccaataagtgccaggtctttctctgcatctcagagaaagactcttaccactctgcccactctgccctcatcccactctgcctggggtgagggcaggggtctctctgggcttccgcagccagatgtggagttccaggaggaggaggggaaggaggagtctaaaggaagatggctcagcctgtggcccaagaagcctcgtagagaccatgagagggggctctgagcacccttcatgtggacactcttttttttttttttttttttgagatggagtttcactcttgttgcccaggttggttggagtgcaatggcacaatctcagctcaccacaacctccacctcccgggttcaagcgattctcctgcctcagccacccaagtagctgggattacaggcatatgccaccacgtttggctaattttgtatttttagttgagatggggtttctccatgttgatcaggctggtctcgaactcctggcctcaggtgatctgccctccttggcctcccaaagtgctgggattacaggcgtgagccaccgcgcccggcccatgtggaaaggccactgtaggccacccctagggaggggataggttgacactcggctcctcctaaggacttcaggtgaccaccagactattgacatagtctactccctcattgccactggactcccagctcatgatctccctaaagcagttgtcctggaggctcagcccttcaccggtgcccgacacaggctcagtgtgatccgataagccgcgttcaacctctctgttgctggagattcgttgatggacgtggcatgagccccaccccgttggaggggcagagacacataaacagacggactcacttccgctggaagcagccctgggaaggagccccagcaggtgcaatgggagcacaggggagaagcctaatccacccccaggccagcagtgaggaaaacatgggcggcacctagcagaggcgaatgccggaccatgggatgcttttgggaagtgagagacatgatagagtgtgagtctgaggacaggagatggtgtggatagctaaggggcagggggcaggggaatttggttcaagagggatggggaggcagaaaaccacaggacaaggagccagccccaggaggatcacccttgggcaggatggggaagcctgtcctcaacccgaaagggaaaggggaagaatgagtgtagattgcatgaaagtttgcaagtggagaaggaaagaaactgatgtcctgtgtgttctcaggaaggtagatgtatgggagagtaatgttggaaactcttaacttctactggcagccacaggcaccattttctcactttttttccccagcagcgctagagcaggtggattttagacagggcgaccaactttcccaggacttttctagccttagcactgaaaatcccacatttgggaaaccccttagtcctgggcaaactgggatgattagtgacctttattttaggattgatccagggatgagggttttgtcaggtagataaggaaatggaatatgggagttatgagtgctgctaagagaagaaaatgtcaggctgggcatggtgtctcactcctatagtcccagcaccttgggaggccaaagcgggtggatgacttgaggtcaggagtttgagacctgtctgggcaacgcgggaagatgctgtctctactaaaaaatacaaaattagccaggcatggtagtgcacacctgaagtaccagctactcagggggctgaggtgggaggatcacgagcccaggaggcggaggttgcagtaagccgagatcgctccacggcactccagcctgggcaacagagtgagaccatgtctcaataaaagaaaaaagaaaatgtgatctattgcaggggctcaaagtggtctaggaaggaagtgaggtcagaacgggagtgatgggggcaataaattggcggaaatggagggatcagaagacagaaggtcactgtgaggttgagaatagggacaatggcatgaggatgggggagagctgattgatgaaaagttgtcagaaaatagaatgtctgagtttaagactctgggcagcgaccaggtcgggtgatgacaagctctgaggtgtttccatggggtgcaattctgaagagagtagaaaataaaggacaccaaggttgagaatgtcaaggaacccaaggcaagattgccaagttattcattaaagcctgccaagataatggcagaggttggagtggaggcactggcaggactccgttgaatgagggggagcagcctggaagctgatggtcggccttgtcaagcacaggtagagggtgggcatggccatctggcacagcatttaaaggaagcaggtggaaagtcatagggcggaagttgtgatgtgggcaggaagaattgggacacggctccatggccctctagcatagggggagtaagagaaagagtagcttccactcaagaagctactaaacaggaaggtcttcccaagcaagacatatttcaaaacaacatggtagggggatgttctgtgaggaggctgcaaatgtacaggagtgtttcttctttggtacaggcttcccaaagggcacggtggaaacagctttggctcagcatgaaggggcctcctccacgctggataatggggtgaggcccaggccctatgggagtgatggcgcctgagctgtgcaccccccagcccacccaaggctgaaggatcagccgcctctctccatgcccatgccataggctcctcccaacaccactgtgactgaggacaagacaagacttggacgcacacttcagtgtgccgcccacccttgttcccttgtccagtcgcaccccaaaccctgctgccaaagtgaggggagctcttacctggggaaacatacaccctaaccaggtccgagggatcgcgtgaccatgaatccaggacccacactgtctgaattttgcaccagtaagatccagcatcatcttcattgaggttctgcatggtcacagtgaaggcgagagcctccgggtggtctctgatggacacgcggccattcctctccaccttctcttctcccttggtctccacaatgctctcacatgacgtgtcgtactgtcctcggcaccagtacttgttatatcccttgtacatgctctcatactgacaccacactgtcagagagtcccccgcagtgccagtcacagagccggggcccttcagagacaaacagcctggaaaacacaagcccgagtcccaagtctccatccagatggccccatcagcagccgtctgtctgaagcttaaggggaagattgccagggagacctgggtgtttcctgggaggggaacctggaggaatacttgagcttaggacctaagccaaagagtccctgtgagagcagaaacctgtcccctgtgagagcagggacaccaagtcacagcacaggggccccagcacctggagaccaaagctggaggcaggagcagagaggagctggtcatcccacctcgtcctgggccctgcagcctctgccaggcatgagatttggtcatatacaagatcacttccctttggagtgagacccatatattctggggtcttctgaatctcaggcttattctttaaaagcacaacttgcggtttcctccactttcagagtgttcttgtgggaggaaaaatactctccggctctgatcttaaccactctccagaaagaatcaacatggcactgggaagaggggttgtccccaaaggaagccctgataagcttctttacctgaatttgggacacaagatgacccccccgacaatagtccccaggtcttgggagtcagaggtcaccatgcattcagaggaaagagggaagctgctctctgtaaccaagtgaggtgatttgggtcctgggaggaaagtggggtttagaatctgggaggcaaagtgtgagaagttgatacggaagcaaagagaagggacaagaaaggctgtaggtaggcagaagttcaggcattatgggatgtgatgctcagcagagccccccaatatcttaagcaagtgctgaaaaactgacaagaggctttgtttgaacttgagtgtatgtgcatgtgcacgtgtgtgtgggtgtgagagagagggagagaaagagaaacagtgatgaggctgagctttgcaccccctcagagtaacctgagttcacaataagaggatgaatacgcgcaggggccacggaagcttaagccgttagaatgagcagaaattgtgaaagagcccctggcatctgtgggtcctatgactatctgggctcctgagctaactacatctagatctgaggtgattgaggatggaggagcccctgacttctggctttcattcatttccctcccctcctcccaccatctgcctttcctccccactctgtctgcagctggctctgtctgtcatatgccttggcagatgtgtgagctgccaccacgcacaccttcctcaccccaccaaccatgcttggcctgagacaatctcactgtcactatctcttcccaccctcctggtcccttccacactcagtagcacctgtcacccccaccctgaccccttcccagcccctaccccaaaccctgctccaaacctgtgttttcccgctctgtgctcccttgaccacagcaaagtggctcctgaccccgcaccttctgagcactccccatttctctgctgtcctaattctcgtaagaaccttcctcgctctggatgctgtgccctcaggaatcttcccattcccaaatccctgctccccacctacgttctcccccaagaacctgttgccccgcagctgcacacccctcctgagatttgagagctggtcctcacctcctcccttccacctgcccccagcttcctcctggaggtggcacatcccagcagcacctccttctaggttctggacagagctcaggactgcatttcccacagtgggagcttggcagggtacaaagggcttgtcacagccaagagtctggtgatggagccggggcctgcttgtgctgcttcctaaagggatccttgctggagagcttggggttgttcttcttctgctaggatcagagccagtcccttcagagctgaatgtgtcctagaattcctgccactccaatcaagaagatgccagcagcagataggaagtcagactcaagagagctttccaggctccttccagcccaaaaagtctttaattcctcaattgcgtaagagctggcctggccttctgcccctggcctctggaaagaggctttctcctctggaatctgtcctccactctcctgattacaacctgggctccttcagccctgctaggaagcaaatgtttcactcctcctctcaatcacacacacacacacatacacacacacacacactggggagagcacagctgagggaggaaaccatgggaccattttgtcccttccagagcccagagccacttacttttagctccctctggactgagctgtttccttccccaggtctctattgggtaaatctccaggtttggggggtctttctggttcacaaactttacaacttttcaagccattctaagccaagcaaacatcagtccctttgaagaggcagaatctcatcctgaaaagcctaaaagtgctattgggaaccccaaacctagcaaatctggaaggtcaccctagaaaagaaagggccttctgcattcatgatggctattctctccagtaggcaaccttctcattgaaatgaaaccaattcaaattaatcttctgaaaagacagaagatggttcttaaaatgtggaaatcacagctgggcgcagtggcccacgcctgtaatcccagcactttgggaggccgaggcaggcggatcacaaggtcaagagatcgagaccttcctggccaacatggtgaaatcctgtctctactaaaaatacaaaaattggccgggtgtggtgcctcaagcctgtaatcccagcactttgggaggccgaggcgggcggatcaccagaggtcaggagttcgaaaccagcctggctagcatggtgaaaccccgtctatattaaaaatacaaaaattagccaggcatagtggcgggggcctataatcccagctgcttgggaggctgaaggtgagaatcacttggacctgggaggcggaggttgcagtgaacctagatcacgccatgcactctaggctgggcaacagagagagactccatttaaaaataataatcataatacaaaaattagccgagcatggtggtgtgcacctgtagtcccagctactcaggaggctgaggcaggagaatcacttgaacctgggaggcagaggtttcagtgagccaagatcgtgccattgcactccagcctggcaacaaagcgagactccggccaaaaaaaaaaaaggaagtcacttgtaaagacttatatttcagaggtagggcagcagtgtggataagagtactatctaaagcccagtaagcaaagccacctccaaaatggaggtaaagcaaggcaacttgcagaggggagagcctggataggtgagcttaaagaaaaagataaaggccaaggtgagcggatcactggaggtgagaccagcctggctaacatggtgaaatcttgtctctactaaaaatacaaaaattagccaggtgtggtggcatacgcctgtaaccccagctactcgggaggccgaggcacgagaattgcttgaacctgattggcggaggttgcagtgagccaagatcaccccactgcactccagcctgggtgacagagccagactccctctcgaaaaaaaaagaagaagaagaagaggaaagaaaaagatgagataaggggtgtggctgattaaatcacagaccctcagatgtagagcatggcttatggttgcttagcccaattttctacttaatgtaaaaatataacaaaagcaaattttcatgcaaagtattggcagatgacaccaaattactgttgtttgaaagaagaaccaggactggattgggaaggagtgggtagatccatgctgttgataacattctagttcatggattggccagtgagctcacagatgtttgttaagttacatataattaaaataaaagagggtcttgaatggaccagtgatgagagagtgttccatgacccatgatctaattctgggcacctgaagttaaggaaaaagaaggttatgctaattccaagatactttcctctgtcctgctagagtgttacctgaatgcaagattagcatttctcaaggaaatccagcatgttcctggaaataattgatggaattatataaatgcgtcggtgcatttgttgaaacatgtgcttgctggttgcttgaggttaatgggagctactaaatattggacagcaatcagttcagaatggaaataccagatgatgtggcagagaggtcagctattttgtcactattactaggttagccttattcttgacacctccatggccaatggaaagagctctgtggaggacacagatctggacttcatttccagcttgtctacttagttcttatgtcatcagatctcccttcatcatcttatttataaagtggagtcaatgctatttgccctgcctgggtcacaaaactgctcagagggttaaattctatcatctatttggaagtgtttataggttataaaaatgtgtaataaatagaattctagttttgctctttttaaattttttacttttctttttttgtagaaatggggtcttgctatgttgcccaggctgatctcaaactcctgggctgaagcattcctcctgctttgacctcccaaagcactgggattacaggtgtgagccacctcactcaaccaacgtttgcttattttgtatttgaatttgcttccttcctctttgtcatttcccctccctgctagaattgccctttccatctctctttcccagttaagattttcagagggacctgcgcaggtcacattgcgagtctgaggatggggaatgagataggggtggaaagagagatggaaagggcaaagaaaaaggaagcaaattcaaatacaaaatgagcaaacattggttgagtgcagtggctcatgcctgtaatcccagtgctttgggaggtcaagagaggaggattgcttgagcccacgagtttgggtccatgtcacctacctggtcttcttcctttaaatcgctgtcattttcactcacccttctagaaagaatcttgtcattacattgggcaatttctatgttttgtgagggaactcaaccataaaattcattctgcaaacatgaagaatgtcctctaatttttagcctaaatttatttccccagagacaaatgtgttttcctgcagttttgtattttgaatgtctattaataagagtttctcttctgaagtccaacctttgcaggacagtttcatttacttgtttacaccacaccttgttccgggaaggatttaaggtagatgttgaggatggcatttttttttttcagacaggatctcaactctatcacccaggccagactgctgcagtggtgcaatctcggctcactgcaacctccgcctcccaagttcaagcgatcctcctgcctcagcctccctagtagctgggactacaggcatgcatcaccacgcccagctaatttttgtatttttagtagagacagggtttcaccatgttggccaggctggtctcaaactcctgacctcaggtgatccacccaccttggcctcccaaagtgatgggattacaggcgtgagccaccacgcccagcccattaattatttctcacaaaccattccaacccctttacactaagcttcgtcaaaacagaactattgttaattcttgaactctccatggtctttaatgtcctcacacttgcacataagctattcctttcccactcagccaactcattcatcctgcaggatggacttccaatgaagcctcagtgacatctcccacccttccaagagcaaagtgaggggttcctgttgcatactctcatcaccacatgaatgagtctctacaacagtaatttccacattgtattgtagttagttgactccctcagttcagaagttactcttaattacagcacccagaacagtcctggcacatatctggtgctcagtaagtgtttgtaggatccgtggatgaatgattgaatgtatagaaggatgcacaggtgaatgaacggatgtatctttcccttttctgtggacacttcacctctggtttgaacccaggacagctcttctacctactgtcctgccccctgcaaaaccaagtccccaaagccacagccccactcacctgagaggcagagaaggagtagagctgggagcagccacatgttcctgtctccttggcttccgtcctcagcaaatctaggtcccagctggaatccaagtatatgtaacggagcctgggtcatccactttctacttgtccaagtttcctttgtgttctcactcatctatttcctcttttgccttttaaagaatgcttcctaattttaagccttacttagcagaagagaaagggtggcaagagacgtttctgagaatggaccaagcacaaacaggaaaatctgttggccttcatttaatgtgaacgtaatgtttgagtcaccccctgagatttcatgactcggaatttcatgaaagtcagtcccagtttacgaaacctctccaacagagaaaactctgttccctgcctctttcactcttcttcctatctgggattacttcatcgatctaaggagcttcccttctctatggctgcctacttttgaatcataaaacaccctctacttaaggagctgtggtgatcactccccatgtctttctcaaccgttatctccatgcggatgacttcacacctcttcctctaacccaatatcccaatatctctcctgggctccagatcctactttctaacttcctatagggaagctccacctggttatacactgttaacctagttcagtatatgggtcatggtcaacagcatagattctgaagtcacacaaactcaaatctcatctccatcatttattaatcatctgaccttgggcatgttgccaaatcactctcctcctcagtctcctcatctgtaaaatagagtactcatgacaattctttctcaaagggttgccacaggaaataaatgagttaatgtaagtaaagtgcttgatacagtgcctggaacatagtaactgcccagttaatattaaatacctttagaatagtcctggaccattgaaatagcttctcatctggtccctccactagctatacattctctctaatccaacttgcacatcagaagatactcttctctaagacatagctatctgaaaatataatttctttccttctctttccccagagatacccatctttgatacccacagcctctaatctttactatcttttagaactctactggatcatctgatatttcaaacttttgttgtaagagcacaacttcttatcttttctgtaccaccatatctgatgaagtattatatagccaggcatggtggcacgtgcctgtaatcccagctacttgggaggccaaggcaggagaatcacttgaacccaggaggtggaggttgcaaagcaatgagccaagatcacaccattgcactccagcctggcaacagagagagactccatctaaaaaaaaaagaaagaaagatgaaagaaagaaagaaaaagaaagaaagaaagatagatagattatatatagaatagagccctggatggaacaataaaacaccaggaccctggtcccatgtgtgacatgagccacacacttgagggatccagaatgagcagagctgacagtagccacaacattgtgtcttagtccattttcttctactataacagaatactacaggctagctaatttataaagaacaaaagttggcaggtgcagtggctcatgcctgtaatcctagcactttgggaggccgaggcacgtagatcacttgaggtcaggagtttcagaccagcctggccaacatagcaaaaccctgtctctaacaaaaatacagaaattagccctgcatggtggtatgagcctgtagtcccagctactcaggaggctgaggtgggagaattgcttgaacccaggagacgaaagttgcagtgagccaagatcacgccactgcatttcagcctgggcgacagagagaaactctgtctcaaataataataataaaaaagaacaaatttgttcaccttcctagctttctgaagatgagaagtccaagagcatcgtagtggcatctgacaagcgtcattccatggcagaagacaagacagcaggcaagcctcctagacagagagaaaaaggggactgaactcagcctctcaggaaaccactctcacaataactaacccactccggagataacagcattaatccactcggaggactgagctctcatggcctaatcacctcttaaagacctcacatcccaatgccattacattgacagttaagtttcaacacgagtttctgagggaacattcaaaccatagcaacccttgtgccatttattcagcagagacaacagttgcaggcttcagttctttccaccaagaggaccaaacaaatcttcagccttcttggttctgcttttataatgttttcttctggttccttttttgaaaatcttatccctacagttgtttataaaataaaagaaatgggaataagcaaaggcatgtgttgatggttgaaaaactataaactcaccatgtctaatataggcacatttcattataatccaattagaaaatccaaactccgaccacctagtaagaccgagttgacacagaagctatcatctggttccaaactgaagtcaaatccaataaaaggaaattccaggtattagaaatgtaaagggaactaaaagccaggtctgtgagcaggatctgataccaagaggctaatggggaccagtcaaaatgaatttgggccttaggaggagaggggctgctgtttaaatagccactcagggacagaagacaatgtctcaggtctacacaagacagggagtgggagcagagccccctgccaaaagctaggatccatgaatggtcattacgcccatggaacaggatgaggggagaccccattgatgggctcatgggagtatcaaggcatctccactccctgtagttataaggagttaccttccatgagaacaagcacctaagttgcactacacaggggtgtgagatccaaagtacaacttcccatcgtgtgggagtgtggacaaggacgtcaatataaaacaggttggcaaatgatgagacttgtagggccatggaagagatgaacacacaccaaaaccacacctccagttcaccttgtgtttttatacaccccatgagctaatgatcattttcacattattaatggtgggaattttttttttaattcatgacacatgaaaattgtctgaaactaaaatttcagtgtacataaataagttttactggaatacagctacacatgttcatttatgtattatctatggcagctttcatgctacaacagcagagtttgttacaggaccaacgagttcatatgcccattgcactggaacaaaccaatacaccaagacaacagggtttgcagcagagaaagagtttaatgatcacagggtaaccaagcaaggagttgggagggaccctcaaatccatctccctgagaagttctgggctgggacttttaaggggattgtagagggcaagtaactggaaaattgggatcattgattggtcaaggtaggatggatgaaatcatcatgatctggaaacagccttctttggtgaatcagcttctcttggattcctctagaccagctggcatcagtagtttcactggtatacaagacctggtaaaaatatctcaaatggaaaacttaatgtctcacaatgcttaagatgttacctatggtacaattaagggggactatagtcttacaaccgggtctgtgtgattctgggggaataggcagcaaatatgaagaagcaggacagagagcaggctgacctcatgattaatgccaaatgtgctgcaagcttggtttattttcatttctccccttcccttcttccctgattaattttataaaatttataggaacaattccaagttgagtagttgtgacagagaccgcagagcccaaaaaacctaaaatctgtactggctggccctggcaaaaggagtttgccattctctggcgttgacgatggacccctccccacttgcaaccagcaatcgttcccactggcaattggaagcagaatcctgaaagcagagcactcttgggctagtcttcttgagggtaacagaagctactttaggtggtgtgaggatttaccagggcagagacaacctagagagtgatcttaggccagatggagggtccaggtagagtctagctcagccctggtgaagatacagatgctcccgcctggccccatctgcctcatttggcagccccacaagttggcactcttctgctttccacttagtgcagccccataggaccccagaagaagcaggtagctttcacctgaggacttcccctggccctctaagcagcagttcctacctgctcctccagccacacatgggatttcctacaagacaactccattccctgcccctgctttaatcctgctgtgccccatcccctcaaaacacctccaccctgactccaccgacacctcaaactcagcctgatgaacatctaacccttctctctcgctgacctccccaacaactactagaacaacagcaacgtgcttctcttccttgactccccggactgccccagcccagaacattcacctcctgctcttcaggctgtcactaaagctgctgcccgtggaactgcacagagctcaggaaatttcctcctccatagataagagaagtgagcaaattaaaagatgattcttactagctttaaggttacttctgatatgattagaatagtagaggattataaaagggagaagttcataaagaaagagggcagcgatgtgctatattaatgtatatagaaaagatgctcctaaattaatcaatttataaagacagagtatatttctgccaagaatgggaaaagtcttctgtttctcaaggacataagctggaggaggctgcacccttcaggaaccttcttagcactgtcttaattattaaacacatactcatgcaattctaatcctttaaacaaccctgtgaggtagaacttctattatccccatgtttcagaggaggaaactgaggcacagaggggccaatcaacctgctgaaggccttatgacccattagtggtgagccactctatgatggcgttcatatgaagctaggattggagggcccaggttgcctggctccaggatctgtgtccttatctcccactacccagctgcttgtagtaaattaatgcagaaacaaggcacaagaggtcatgatggttgctctgagagaattaaacagagtgatatggccaagaaccacccaggacggtctgagaagcctctgagaaggtgacgttcagaatgagactgtgctggcattcagaagagtgcaccagatgcaaaagaagaggaggcaaggccgggcatggtggctcccacctataatcccagcactttgggaggctgaggcaggcagatcacctgaggttaggggtttgagaccagcctggccaacatggtgaaaccccatctctactaaaaatacaaaatttagcctggtggtagcacacgcctgtaatcccagctactagggaggctgaagcaggagaattgcttgaacctgggaggccaaggttgcagtgagccaagatcacaccactgtactccagcatgagcgacagagtgagactctgttgaagaagaaggagaaggagaggaagaggaagaggaagaagaagaagaagaagaagaagaagaagaagaagaagaagaagaggaggaagaagaaggacgaggagaagaagaagtggtggggagggggaggggggaggggagggggaggggaggggaagaaggaaggtagtagtagtcaggagagtgaaatcaggagcacctagtgatgcaggaggaaaaccaggagagtctgggctgtagactgaatgcttatgtccccccagtttcatacattgaaaccctaatccccaaggtggcggtatttggagttggggcctttgggatatgattaggccataagggtggggctcgcatgaataaaattagtgcccttataagaagagacacaagccaggtgcagtggtgcaagcctgtagtctcagctactcaggagactgagcggggaggatcactagaggccaggcgtttgaggctgcagtgtgctatgatagtgcctgttaataatcaccacacttcagcctaggcagcatagtgaagcctgtctcttaaatttttttttaattaaaaaaaatcatagaatcatagaagagatacaggagagcttgctttctctctccctttctctgccatgtgtagataaagaaagaaggcagccatctataagccaggaagacagcccttaccaggaactgattcagccagcatcttgatcttgaacttccagccaccagaactgggagaaatgaatttcttttgtgtgagccacccaatctgtggtatctttgttatagcagcctgagctgactgagatagtctgaaagcaaagaaaggagaaagaagggaggaagaagtgctcagccgagtcaagggctgctgaggtcaagtaagatgcagaaagagaagatgcatttggatttgactgacagtaaggttgttggttccctcgtcaagggcatgtctgtagagtggtgagcagagaagacaggtgggcttgactacagagtaaatgacagatgaggaaacagagtcagaaaatgcagatggtggccgggcgcggtggctcatgcctggaatcccagcactttgggaggccaagtcgggtggatcacttgaggtcaggagttcgagaccaacctggccaacatggcgaaaccccgtctctactaaaaatacaaaaattccctgggcggtagtggcgtgtgcctgtaatctcaactactcaggagactgaggaggagaatcacgcgagcctgggaggtggaggtttgcagtgagccaagatcacgccactttactccagtccaggttagagagcgaaaccgtgtattagaaaaaaaaaaagaaagaaagaaagaaaaaagaaaagaagaaaaaagaaagtacagacactgttttataagaggctctgagaaggaaagtggagagagaggaaacaacagctggagagggctggggacaaaggggagcgtttgtttaatcaaagtcctccagtatgctgagaggtgagtaggcagatcttctggaaaacctgtcctggttgatgggcagatatctccaggacatcattgtgtgctcacagaacttgaaatccaagcacaaagatggagttaattacaacaaactaaaattactcgggtgtggaaaaaaaagacaacaacactgaaaaaactgaaacaaaattaccaaaaacatcaagagcttacacagatcaaaatgaaaaatattcaaactaaaagaaaaattggcaaacaccatcaacctacaattctcaaaagaagaaatacagatggctgacattcagaagaaaaagcacttaatctcactgaaaatcaaccacatggatatactaaaacaacaaaattataaatttttccagattagccaagaggttttctaaggtaatgctcagtaaaggcaggcaacagagtggtggaatccgtatgctgtctataggtgatgtagtgctctaattctgcaaagcaatttagcagtaagtgacaagaactctaaaaatgggctttctcttcgcccagtaattccacttttcatattctattctaagaaaaaaaaaatgaaaatgtgaacacatagtagtaaaaaatttaagagaccgtaattatccaacaaaaagaaactatctaactattgggccgggcgcagtggctcaaacctataatcccagcactttgggaggccaaagtgggtggactgcttgggaccaggagttcgagaccagcctggccaacatggcaaaaccctatctctactaaaaatatcagcctggtgtggtggcacacacctgtcatcccagctacttgggaggctgaggcaggagaatcactggaatccaggaaatggaggttttagtgagctgagatcgtgccactgcactccagcctggaagacacagcgagactctgccaaaaaataaaataaaataaaataaaataaaataaaataaaataaaataaaataaaataaaataaaaataaaaaaccctcttgagagacaatcaagataaagttctacaaactgaaattaccagatgaaaagttgcattttgaaaaatgagagaaataggtgggatttgactaaaacattagagatgaagaataatgtgagtgaaatctttgagaatgcgatgaccaaggagagaattttcccaggtccagcgtagcgcttgaaaaaacacaagcaagctttaagaagcaactgccagaaaaacagaaactgagagagattctgaaatccaggcactcgtgtggggagattgcagaagttggtggtatggctgaaagaaaatgaggaagctttgaaatgtgattcagtggcttcctgctgtaaaatcttcactgtctcctcttagctgtgatcaaatccagaccccagcatgattcacacagccctgcaggacccagcctccttccatcctcccggctcacacttttgctccagccattccaaagcacagtatttctaatttcccaaatagcagctgctccctcgagccagcacgcctgcatatatggtgtttgtcaaagcccttccagcctcccacctgccttccttgatacctggagcccctacacatccttcaaaatgccgataaagcttccctgcaaagccagctctggcagagtcgagctgctgcctctgtgcggcacagtacctgggttgcatcattctgtcttacgcccctctcccagcattcttttccgggtgaatctgccttcactgttgctttgtgtagggcaccacaggtgcggtgggttgagttaatgtgcccaagcaaagtcctgtctcatatcatttctctgtttagtcctttctatctcatttcccatttccaatccccggcatccgtacacttgtgtgattgtcaggtatacatgctggcttcgtaggagtgtgtttaagtttacataactggctgggcgcagtggctcacagaggctgaggagggaggatcccttgattccaggagttcaagaccagcctgggcaacatagtgagacccgatctctacaaaaaaaatttaaaaattagccacgcatagtggcacacgcccatgttcccagctactcaggaggctgaggcagaaggattgctcaggcccaggagtttgaggatggagtgagccatgattgcaccactgcgtttcagcctgggcaaaaagaatttatgtaaccagctttatgccatcgatctcattctggttttagctttttcactcagcactggatttttttttttttttttttttttttgacgttatctcgtcctgtggcccaggctggagtgaaatggtgcgatctcagctcactgcagcctctgcctcccagattcaagcaattctgctgtctcagcctcccaagtagctgggactacaggtgcacaccaccatgcccagtcaatttttgtatttttagtagagactaggtttcaccatattagtcaggctggtctcaaacttctgacctcaggtgatccatccgcctcagcttcccaaagtgctgggattacaggtgtaagccattatgccaggcctcagcactgggtttttaagccccatccacgttaccatggggccgtagagtttgttgactagaactggagcttgtatactacaggaggtgccgggtttacttgtcggcccctcccccatgttgcacacctgggctgcccccagctccctgctccccagacagcacagcactgagcatgctctagcctggcctctgagggcctgcatgagagtttttctgggctctgcctgcctcagcaggattgctgagtcccaaggtaaacacacacttagcctgacagatttctctccaaaaaggccacgcttggcttgtgagcgttctttcgtgaccagagcctacaatcacaacctgtttcatgaagcagagcaggcttttcgcaaactgctcccgaagtgcagtctccctttgatcctggcatgagtgtgttgggtcaggtgaaaatgcagtaagtcctcgggccttcctgagagtccccagtctaaacccttgagtccagattaaggccaagccaggatcctcggtttgactcaacagcaagagctggagccatcttccccacattccactgcgtggccagcaatgacttcttgctgtcaacacaacactgacggttgtgggggagaaggggccctgaggactcccagccacccccaattcagactccaggcttcttcctgcaatagctccttttgaggaccagctgcgctcttcacttaaagtattttgcggccggacgcggtggctcatgcctgtaatcccagcactttgggaggccgaggagggtggatcacctgaggtcaggagttcgagatcaccccagccaacatgatgaaaccccatctctaccaaaaatacaaaaaattagctgggcgtgatggcagaggcctgtagtcccagctactcaggagactgaggtgtgagaattgcttgaactcaggaggcagaggttgcagtgagtcaagatcatgccactgcactccagcctgggcccagagtgagactgtgtctaagaaaaaaaaaaaaaaaaagaagagatcttaaacaatatagggtctggatagatagtgctgtgacaagcaaccctaacatctcagtagcttaacacaataaaggtgtatttctcagtcagatcatagacaaaggaaagtcaggcagatctctaggtggcaactggaggacctgggcccttccatcagcgtcatcaccttcatgctggtttctatggtcaccatggagcatgtaagaaattgcacaggtatctaaggccaggcccagagttgggtaccagacttccaccacatccaggggaaccagacactgaggctgtctggtgggacgtcacagaaacaatgtgagcccttgtatgcctggcccttaaaaccatcccatgcacttaacgtttccacgaagatgaagtagacagacttttccctatccctcccaccaagtagaactaagccctgatcttgggtataaaacaagcatgagggccaggcatggtagctcacacctgtaatcccagcactttgggaggccgaggcgggtggatcacctgaggtcaggagttcgagaccagcctggtcaacatggcaaaaccctgtctctactaaaaatacaaaaaattagctgggtatgcatagtggcgggcacctgtaatcccagctatttgggaggctgaggcaggagaattgcttgaacctgggaggtggaggttgcagtgagccaagatctcaccattgcattccagcctgggtgatggagcaagactccatctcgaaaaataaaaaataaaaataaaacaagcatgagaagggactgaaaggtggacagacagtagggtccacggaacaatgtagcaatgagttatctgggttttctctttcctttatgtatcccagacttggagacagccctgatggagaggccaccaatgcagaaacaataacaggcacagaaaaacaacaacaaaagctgtccctctctctctagaaaaaaaaaaaaaaaacagggaacgagcaacccagcaatagagaagaacttagacaatgactcctctaccctacagaacaccccagaaaaaatgatggccccaccgcccaggccagcaaaggcagagtgggagcttagacatccacctccacccagctgtaaccaggcacccaatccccctgccaggtgctgtcagggaaggctgggtagggaacctggacttccacccccactcagcagtgagaagcccaactccctcccgcgggggtggcctcaaccaggccacatggggagtagtgagaaagaaaagggactttttatctgaggaatgcgagcccttttaaatgggcagactcagagaggcattcagatgtgacagcagtcacgtctcactccccacttgagcgaaataattgtctctggaagccacctgcgatgcaggccctagacgaacggacaccacatagccatgaacaccgtaaacaccacgcactggacgccataactcacacctgagctcaacaatgcactgccagtcaccgaccgatgtgatttctgtgaactagtaagaattcacatcagacaactccagactgtcagccccctccttgcttccttttgcctttcaaaacttgcttgtaggccaggagcggtggcttacgcctggaatcccagcactttgggaggctgaggtgggtaataatttgagggcaggaattcaataccagcctgcccatcatggtgaaaccctgtctctaccaaaaatacaataattagctgggcgtggtggtgcacacctgtaatcccagctactcaggagactgaagcaggagaatcacttgaatctgggaggcagaggttgcggtgagccgagtccacaccactgtactccagcctgggcgatagagcaagattctgtctccaaaaaaaaaaaaaaaacctgcttgtaacaaaagccaagcagaccactcccaaaggcaacttggaagtgcgtctccgacagctgtcctcacttcaactgaaattaactctttaaaattgtattttgtgcctcagcttcttcctgtaggtcttttgacccctcttggccaggggcacatcaatggaggcccagtagaagccggaattcacatcctcacccactggggtccatgaagccccacttgcaagcccgtctcaacgctgggctacgccacccttctgtatattcccatggtcccctctacatttccaccaggaaaccaggttattgtactcaccaatatccttgtctggatattggtggctgggtgcagtggcttactcctgtaatcccagcactttgggaggccaaggcaggcagatcacttgaggtcaggaatttgagaccagcctggccaacatggcaaaaccccgtctgtactaaaaaaaaaaaaaaaaatacaaaaattagccaggtgtggtggtatgcgcctgtaatcccagctactcacgaggctgaggcagaggttgcagtgaggtgagatcccgccactgcactccagcctggtcgacagagtgagactttgtctaaaagaaaataaaataaaatccgtgtatatgtggctgcgtttcttacacaacacctcacattattcaaagaaatctgagacacccaccctcacccccgctgcctcgctctcaggaaataagcacaggaaaactaaatcactgcatgccatcaatgggggagtgtgtaagtgacagcagatgtggtgcttccaatgaggccaagggatagggacgattggaaaatcccaagcaaggcctgacctgccaactacagccaaatggagtaataccttctccaaacacagacaggacttgggtggcagccactggtcttttttgttgttgttgttggattttttttagatggggtctcgctctgtcacccaggctgaagtgcagtggtgcaatctctgctcaccgcaacctcagcctcccaggttcaagcgattatcctgcctcagcctcccgagtagctgggattacaggcacccaccaccatgcccagctagtttttttttttttttttggatttttagtagagtcggggttttaccatattggccaggctggtcttgaactcccgacctcaggtgatccgcctgcctcggcctcccaaagtgctgagattataggcctgagccaccgcgctcaaactggcagccactggtctgaagcagggaagaactaggtcacctcaagtgtcctgtgagagaccacagtctgtgccgagagagaggaagtacccgtacaggccccagcataacgtccctcgattaggaattccttctgacttgcttttgttggacagcccttcctccacaattagatgagagaaacttgcctccttgtgagatgagaccaacgttatcattagacctccccatgggtggaagttgcatttgagtcctatgattccctacaccagaaaaaaaaatgattaatataaaaaaaaggagaaaggtcagaatgctcctttcccctgctggatcaaggctctgagacaggctgaaggcagaaatcctctgtcattcctgtccccttctcagctaccaggggagcgtgacccgttctggggctccagacactgttatcacagaagatttgctctttctggcaggaagcaaaaacgatgagactagtgttgtccaaactgagggttgcaacctggttgtgggtcttaagcagatttttttcttacaagtagtgtgagagaccaatggaatctcagattcccaaactcactatgccaaaggggaagagaagcttaggaactgggtcaccaatgctgtcttcctcttgttcccaaacagatggctgcaatggcacaaccctgtactcccgctcttcacatgtttactttatcttaagtcaaatgcagattaactgagctgcacacaagacatcattgacttttccctccacttcctctttccaggtgtaaaatgtagttttaccaaagctaatcagagcctcacgggaatgtaaccatttgcttccctgcctcccctccctcccttttttccctcctgctttctcttcctccttcaaagactgaagttcccggtcgggcacagtggctcacacttgtaatcccagcaccttgggaggctgaggcgggcagatcacctgaggtcaggagtttcagaccagcctggccaacatggtgaaaccccatctcaactgaaaatacaaaaacattagccgggcatggtggtatgtgcctgtaatcccagctactcgggaaactgaggcaagagaatggcttgaacccgggaggcggaggttgcagtgagccgagatcatgccattgcattccagcctgggtgacagagcaggactccgtctcaaaaaacaaaaaaaaagttcctaaaacctcctttggaaaatgcatctgtgatctgttttgttttgttttttttttcctggacaaccttggctaaacaaacctctaatgcactgagacctgcctcagtcatgttttggtctgtaacagggtatgtcaggatcaatcagagcacatctcaggttataatgataaacactgagattttattttttttttctgtatgcgtatacaagtattgccaagtaactaactttctcactgtgagtcatggtcaaaaaatactaaaagtcacgacatgggccgagtgaggtggctcacgcctgtaatcccagcactttgggaggccaaggcagttggatcacctgaagtcaggagtttgagaccagcctggccaacatggtgaaaccccatctctactaaaaatacaaaattagtagggcgtggtagcacgtgcctgtaatcccagctactcggaaggctgaggcataagagtccttaaacccgggaggtggaggttgcagtgagccgagaacacgctaccatactccagtctgggtgacagactgagacgccgacttaaaaaaaaaattcatgacatcaattatgtgtgagcattttacttcaatccagaataaagaacaagggaactctcccaccaccctctgtctcttggtgcccagaaactccatcgagcacgttctggtccagaaaaaaagagggggccctgcagtggccaaccctatgtcttgctccattcagcctgctgtaactgaaatactacaaagtgggcagcttaagcagtcatttatttcttacagttatagatgctggacatccaagatcagggtgtcagcctggtcaggctctggcgaaggcctcttctgggttgcagatgactgccttctctttccatcttcacatggcagagagggaggtctacaaagctctctggagtctcttttatgagggcactcatcccatttatgagggctccagtttcaagacctaatcgcttcccaaacccccaataccatcagcttcatggtcaggatttcaacatatgaatctttggtgggggaagaagggggacacaaactttcagtccatcatccctggaacaggcagataatgccagcattttcttcatcagtgtcatggacttggcgttatgcaagagcagtgtcgatcaggaacgggaaacaagaaggtttttgtggttatgaccgaaaccatctgctcacatcagcccatttgtggcttttatttctttttttaatactcaatttgagcagagagcaggctgagaaaggagtgctggcatcaggagctggcagcgttagaagcacctatgcagagggacaaaagccccaaagtgagcgactgctgggcttcgagccccagtgccccccacctcaccacgcccatgactcctgcatcttcctccgagacccaccctgcacagctgactcacttgccttcgtctgtgcaaataacttccccatgggtctcctttttcatttgcttctctcccctttatttcaggctactaagggatgcaacgttgacggtgctaagcagagcctagaataggagagagggctctccagaaaagacctggaacattagagatgagcaatgccactgttaggagcccatgggtcccgccctaagcctccgaggcctctccttcaccttcatatccacaccagacagggctggtgagcgaattctggaggattcaaggcgagagagagtcccctgtgttcttaacttcggggagctgaggtcacagatacacttgagattgtaacaaaagctatacacccatgccctaggaaaacacacacatacactgagtttcgcatatcctattaaaagaatctccagagtctttctatgtattcctagctaggaccccccaccctggcagggcgcggtggctcacacctgtaatcccagcactttgggaggccaaggcgggtggatcacatgaggccaagagttggagaccagcctggtcaacatggtgaaaccctgtctctactaaaaatacaaaagttagctgggcattggtggtgggtacctgtaatcccagctacttgggaggctgaggcaggagaatcccttgaacccgagaggaggaagttgcagtgagccaagatcgtgccattgcactccagcctgggtgacaagagcaaaactccaactcaaaaaaaagaaaaagaaaaaagaaacagatgagagagatatgactctgatgctagaacagaggaggagcctgcagaaggtgtgcaagcacacatgtgcgcacgtgcacacacataccagctgtcagacacagtctgtgctctttgggaaggagggtgggggttacaggacactcccatgtgacaaaacagcaatcatcccatgtcccctgggtgcataaaaacatctctctttgcacaccagcacacagccacatcttccttgctggggttctttgtgaccactgtgaaaaagcatttgccagggctgtcttgatggtacacggcgctcctctcctgacctcaggtggtccacccacctcagcctcccaaagctctgggattacaggcgtgagccaccgcacctgacccagaccctgcattcctttccccactgggcttctctaatgttcagaacaactcaaatccatttgtgcattctgctgccgcatatggaggccctgctaagtgtgagtcctactttgtgtttgcagctgcagacctcatgctgagcaagacttcgcctggccctggaggggctccccactacaccctgggttgcctctgtgccctctggactaccaggcctggcttagtcgctttccttgggcctctgtttgttatcagcagagcccacccatctgaggctggagcctgaaactctagtcatccctctgattccctcatcctctccccagtgcaccccagccccacccacctccccttccccagccactaggcctgctgttcctcatgctcccaccagcctcccccaccccactccccggacccaggatgtccaggaggggcagatgtgtcactgtgtctctttgctctctctgcctcatctgccaacatttggggagcttctgtcagctggactgaaactggctttcatgtttcttactactcccttgcgtctctcttttctacacctcagttttgttgttttcccattgcatcaatgtttatacgtagagctgttcagaaaaagcagaagctggagacaggaaaactactaatcacaacagaaactttgtggctttaattctcataataattagcatcacagggcacccacccagtttctcaagagcctacaacttccaaaaacagacaagttaagtcacatttttatgtatcattgtgtcttcaaatatactaatccagcagatttatctgacatcaaaacagggagttggatgttcagagggcaaatcttacccaaaaattgctgacacagcccctaacatgttacattattattaattggacagtcacttaatgagcgtctactaagtaaaggcgctgtgtatacaaagaagaaggagagatcatgattctgtcaggatcctgggagtgggccaatggcaggctcagttggtataacagaataatctaatgcaggggaaatttacaaagagaaggaaagagttaagtgaaatcaacaagagatggagaaaaaacaggactagcaacagcagtagggccacgacacctctaacacagggagaggtgtcagaaataaccagaacccacaggaactgtaggacaggaccatgccacaggggctgtgacctcaaagtaggaaaacggacactccagcccagcagggtggcacctgggcaggagaaactctcaccttcctttctcctgctggcaccacccattgccattccttggaaagaaaataaatcttgggaccccaaactcactaagccaaaggaaaaagtcaagcagggaactgggtcatgcaaacctacctcccatgttggttcctaaatgagatggtgacaaggatgacaggctaccaacctccctcacattgtggtctttaaagcgtttctgttaaatttccccatgccaatgtaaactgatagcttatcttcacaggtgcgagacacaggacagaactcaaagtcattcctctgcccacctgagacaaacgcatatctgactgtttcctctgccctgttgtttacgttatcttaggtaaaaatgcagattcactgagccagacaaaggcctgaatggctattttccccacctcccctctcacaagaaaattgtgtatttctcaatatcccaccctttcccttttaaatattgaagcccccaaaatcatcttcagagaaaggtatagacctgtctcccaggcgcgtttccttaactttggcaaataaacttcctaaaatgattgagacttgcctcagtcattttcctccattgacaacctgagcccaaccagaagccagagtgaggttatctatgttcccctctccaataagaatagaaacccccactccagagcaggtgcggtgtctgactcatcttcatatcccagcagtaagtacagtgaccagctcaccgcgggtgctcagtaaatgcatgctgtgtgaagagatgaatgagtgaatgtccgtccactcagcaaccttgcagccaggtgtggttgctcatgtctgtaatcctaacattttgggaggccaaggcgagtggatcacttgagaccaggagtttgagaccaacctggccaatatggtgaaaccctgtctctactaaaaacccaaaaattagccaggtgtggtggtgcgtgcctgtaatcccagctactcaggaggcttgaacccaggagatggaggttgcagtgagccaagattgcgccactctactccaacctgggtgacagagcaagactctgtctccaaaaaaaaagaaaaagaaagaagaaagaaagaaagaaagaaagaaagaaagaaagaaagaaagaaagaagaaagaaagaaagaaagaagaaagaaagaaagaaagattcttacaaactataagatactaaattatctaaaattatttcaaaataaagaaggaggttttgatgctatatgcaggtaagaaaggttggaattaatctctggaataacacacatgattttctcaattcctgtactaagcacatatgcatggctccagaaataagcagaaagtctttgccatttcaactgtcccccacatacttactatgttaacccacttctccatcaacacttctgccccaggcaactagaagagagagaaggaaggtggtgaaaagcagcttcatggttctgcctactgagctctgctctcccctctatacagcccagtcctcctagactctgggctgaccatgctacagagagcaagtgctgcatgctctgccttctgctttggtgcctccctatctcttcttatggtggtctccattcacacctgcaatcattgtttattctactgcttttttttttcttttaagaaagaaactgagatgataagcagcaactacttgacaagcaagtgttcaaacacaatgctatggcaatctcctcaacatgcttgaaatatatgaaaagatagaaaatctcagcaaggaaatagacacaaagaagtagcaagtggacattttacaaatgaaaaatatgataactaaattttttaaattcagctaatgggctcaacatcaggagggagaggacagaggaaagaatcggtgaacttgaacacagaacaatagaaattgtctgatctgagcaaaagagagaaaatagactttaaaagatgaacagagccttaggtagctgtgggactgtaataaaagagcaaacattcatgtcattgaagttccagaagaagaaaagaaagaaagcagagttgcaaaaaggtatttgaaaacataacggctaaaattttcccagtttcagcaagacataaagctacagatcccaagataactatcctcaaagtcagtcagagcctgggtctaaaaaccattttgagcagattcctggaaaactcaatctccagtccaaacattcttctaacctcagacctccttgccatccctctccttgatatctgcacttgagccgtctcaaagatgcatccaactcaacaagtccaaagtaaactcacaattatgccctccagaaaggagtcccatcaccttacactgtttcctagttttcatccctgacccctctgtgtcttcatccccacactctgtcctgcctggagcccattcaatgttgcctcctgttaaagctctcagatttgtccatctctctatctccttctctgccaacctagcccaagctaccatcgtctgtcaatagcctcccaggtggtctgcccacgttcactcttagtttttcgccactgtgcagccagaatggtatttttgcaaacaaatctgatcttgccactccccctgtaagaaacattaacagcctcccagggctcttacaactcctctactggacctcagtttggcccctgctgacctcccaagcctcaagccataataacctcccacttaatccccaaggggcaaccacaaagattttggttcctcagacagaacacattcccttgattacagtgactgttcacacactgtttcctgggcctaaaatgctcctttcctctctttgcttggttaactcatactcttcctccaaatctcaaataaattatcattcattcaactcaacaaatatttactggacacctactacatgccaaataccgtgctaggtgctggaatgcagcaacaaacaaatcaagcttctgtcctcaggaagcttacattctcctagggggagggggagaggagaaaataaacacatataaaatgtaccaggtggtcataagtgccccgaagacaaaaagggtagagggagtgaggggaggcaaatgctattgtattaatatctatagagaaggtatctatgataaagtgttatcttattttaacagagacctgaaagaagggtgggagccacactgacagctgcaggtgaagagtgcaaggtaggccgggtgcggtggctcacgcctgtaatcccagcattttgggaggccaaggtgggcggatcacgaggtcaggagatcgagaccatcctggctaacacggtgaaaccccgtctctactaaaaatacaaaaaattagctgggcaaggtggcaggcgtctgtagtcccacctactcgggaggctgaggcaagagaatggtgtgaaccccagggggcggagcctgcagtgagccgagatcgcgccactgcactccagcctgggtgacaggagacaccatctcaaaaaaaaaaaagagtgcaaggtagagggggctgctgtgcaaaagtcctggggtgggagcagaggccaccatggctcaggaagagggaatgagggcaagagtggaatgagacgagatcagaaaggaaacagagtcatcatttaagggcccataggccttaatagggagttggatttgactctgaatgatgcagggagccattggagaattacgtgacctggcttactttaaaaggatcacacgggctgctgcgaggaaaaaacaattgacagaggtaaggcaggaaactgggagacatgaataagcaattgtagccttccaggtgtgagacaacggtgggctaggccatgtgggggaagtggatggggtgagacatcgctggagcccagttgaatcaatgcccctaatggaagttcccagagcacctccttcttctatggtggttgtaatgggacatttattggtgcacatttgattaatgtctgtctccccctactgggctataagcctcaagaaggcaagaaatgggtcttctttgctcaccattgcatttccaacatccagtgcccacaatatatgctctatatagttttcttgaatgaatgaatgaatgaatgaacaaataccccaaaaacaaaagcacaaacacacaatcctttaagtctacttgggaagcccagccttccctgctctcttgaggctctgcaagaagcagtcatgcaacatccactccatgcccagcaccttccaggcacaatattaaagaagtgcaggggccaggtgcagtggctcacccctgtaatcccagcactttgggaggccgaggtgggtggatcacaaggtcgggagtttgagaccagcctggccaatatgtgaaaccctgtctctactaaaaatacaaaaattagctgggcatggtggcaggcacctgtagtcccagctactcaggagactgaggcaggagaatcgcgtgaacctgtgaggtggcagttgcagtgagccaagatcacaccactgcactccagcctgagcaacagagagagactctgtcacaaaagaaaaagaaaaagaacaagagcagggcagtgtgacatttgctacccaggttcaggtccagggtctgccagccatggccagagacataataattgctaagaattactgagtttactttgtttcagagaccactttagatgctttctgttattactttgcttaaatcccgtgcaagtcaaacaaagtaggtattattattattatccagatgcataaactgtatggcacaatcacacatccctgggtcctcccaggagggccaccacactctgaaactccagtcttttctatttttcagagacggagtctcactctgtcgcccaggctggagtgcagtggtgcaatctcagctcactgcgatcttcacctcccaggttcaagcgattctcctgcctcagcctcccaagtagctgggattacaggtgcccacaaccatgcccagttgatgtgtgtgtgtgtgtgtgtgtgtgtgtgtgtgtgtgtttagtagagatggagttttgccatgttggccaagctgatctcgaattcctgacctcaggtgatcagcctgccttggcctcccaaagtgctggggttacaggcatgagccaccgcacctggcctgaaactcctttccaaacctaagtttagatttccaatgccactgaaatctcacctaaattcagggcaatcagagggagaagcttctacacaccccaaatctcaggctgtctctccatctccttcccttggtcaagtggcaacctcccaaggacggccacaaggcacccagagcccagctgcagagtccactggctctgtgggagtcctggagataaaggacaccaccgtcccctctcagatgccccaagctaaatggacccagcaaagcctggcccagcagctccaactgctgtctgtggggaagctggctgaaagagctccggggcaggctccgtgtcttatctgtcctgcaaatccagagctgtgggtgccaggagccaaagcctcatttctgagcctggtttgtgtcctagcttagcccagatcctaaaagtcaggagatgaaggaatggccatcattcttcttgactcaactgcatgtttgagaactaagatgccaggactcacagtgacaggagaggcagtgcagtcccccagtgcatagcagctgcaccctgaggctggtgtgtctgagcaaagccaatgcagagctgcgggccctacagatcccatggggaaggagggagaggggagggcaggggagggtagcagctgaggagggttctcactgcctcgcctgaagctgaaacctagcatccagtgggtgatagtgcctggcacgttgcatttcccagggatggaaaaatgtacttttgtcccctccaatcagttggaggtgtgcctggaaaagtgagttgagaaggatggggctgagcttgggcctcctgggctatcacagccactgagtactgagtgaagagtgatggctgatgagagagggaagcgagggtgggtgtgcgtgtgccaggctttcacagctccagagctgagctgctccagagctcatatcgatagagacagaataacttcatccacaggattctgcctgctgagaatcagaaacaagttccctcttcctggccagccatgccaagagccctcagctagacccgtcaggattctaggtccctaaggggcacggagcctccatggactgtcctgtttgtggttttagcctctgggaacagttggctcccatctgacccagcagcagccagaaaacatcaccacacttgatccaagaacccaccgttggggccaccaggcaaccaagccaccaggctgaagttgcaggcagcccctagccctctctcctcacctctccgtcaccctcttcctcctcctttcctgccattcgccatctatcaaaataaaaactcaaattttaaggacaaatcctagaaaatgagtgaatacagaacatcagggaagaggaatgtagcattagttttatcccttaggccttgagcattgatgagtttaaagaaggaaaaatcaagaaggaaacttgagtgaagagaggcaacgaatgggggaaaagctgggcaagatgttagaaggaccggattctagtcccagttcaccactcacctggggcaccagacgtcactgttctcacctgaggtcctggttgtgcatagggttgtctctgggcattggaggggagaaccagggagccggcccccaggaccacccctgcatcacttaatgcagcttccagattacattttatttttagtagagacggggcttcaccatgttggccaggctagttttgaactcctggcctcaagtgaaacacacacctcagcctcccaaagtgctgggattacaggcgtgagccactgtgcctggcctccagattacgttttatttcaacaagagtttctgcaaccaaaaaaattagagtattaaatattttctacaaagagtatatacgacctgtaagttataaagaataataaaatgcacacctatgtgcccccacccagcttaagaaagagaataactttaatttttttatttattttttgtttcctgattcaaatgtaacatatattgactatagaaattttgcaagatccggaagagagaaaacaagtatcaccacaacttcattatctttttgcaaacattctggtgacaattctttcctgtttatcctgggtgtgtatcttttttctgaaattgagatcctatggtgcaaattgtccccttttttccatcatggccatcttccttggatcagctaatttcttggcaccctttcacctccaagatttcaagttaaaaacccccggattttttgtgggagtgggattcagagttgattttccaaaaagaagcagtagtaggaattgacagattggggaaaatctgtcctgtctggcttctacctgaaacatacactacattaagaggttgataaagtgcatcctgtcatatctcgcccagagcggtatctcaggattaatgttgattgatgtttgtgtctcatgaggctgaaagcatgaggcatctctggagataagaaggaaaatgaaagccagtgctttcaggattaaaaaaaaatgccttagaaggcttccctgcagctccaagccaagcaccggggcctgtgatagattctcagtacacactgcgtgcctgtatctcatcgttgtgcctgttcagtcatcatttatccagaggataaggcacggttctataaacctacctagaacacactcaggcaaaaggggacatacattagaggaatacgaggctatcacccatcattcaaagaaaatccatgggaaaggcaaggatcctgttgggtgtcggggtcaactggaaccgggcaatcaaacagcccctgggttctctcttccttgtcctctctgggctctattctctcaccctagagacagctttctccaggaggagggaaaatggccactgacacctctcacgttttccatcttaggagttttattcccagagaaagccttacttccttccttagcctcagttaaaagtaaaaagaaaccctgcctgggaagaactgagattggcctgactttcatcaagtgcccaatcctggaccattccattgtgtccagggtcactgaaagtggcagcacaccccactgaattgcagccatgcagttaggggatatctgagcctaagagcagtcgctgatcctaagcaggagttgaaatcatgaaagtggctgcaaatcacccagtgagtgtatagaaggaaaagaagaaagcagggcagaacactgggcgtaaacacaatttaaagaatggaaagaagacaaggaatccaggaagaaaagtgaaaatggctataaaaaaaagcaaataggtggaaaatccagacagcacagagccacaggagccaagaaggctggagtttggaggaggacggagtacccaccagcatggaagtccaggaaaacatgcaaaggagaatggccctggggtctggaagcaggaggggcactggtgatctctgcaaatgccatttccgtggagggtgggagtggaagccaggtgaagaccagcaaatacaacctgagggtagttcttgaggaaaatagttagggaaggtgggaaaggtggaataggaagcgggagaggcagaggagacagtcccttccaccttaaccacatgggtttatagatcagacctcccttgacaccaaaccctttgcatgcaatcccctgttattcaatccaatgtcacattaaatgtccatgctatacactataagaaagtatttctaataataatagctaatacttataataaatcacagaggcctgactcaagctcacgttctcacctattctttctgctccttccccactggtccactaaagtaaaggagtacatttttttttttttgagtcggagtctcgctctgttgcccaggctagagtgcaatggcacgatcttcagctcactgcaacctctgcctcccgagttcaagcaattctcctgtctcaccctcccaagtagctaggattacaggcgcctgccaccatgcccagctacctttggtatttttagtagagatggggtttcactgtattggtcaggcttgtctctttgccaggctggtctcgaactcccgaccttgtgatctgcccacctcggcttcccaaagggctgggattacaaggatgagccactgtgcctggccagtaatggggtaatttgtctagagggagatgatagagcaacagaggccagctcctcccagacttacagccttcccctaagaaaaatgagtgctctctccttctatttctaccaaacatctacctccattctaccaacactctctcccagctctctgaaggagaaataaagccctgtctgagttatgtgtggaggcacaaccattagttttggacaaaacagcaattctagataattgcaatgttcagggtgtctgccccctacccaatggcccctctctggagtccaaatctccccttctctgcttcatgctgtaggaaactgcagaactgacaatgaggttatgaaatgcctgggcgtataaaaggcagacagtgctagactccaggagactattcaaggctggctttatttagtgtgtcccacagccactaattgccgggcagatcctgatgccatagctgatagaacagcacaaggcagctaggacacccgcaatgtggccttctggaaatgggaccaaaagcccattctcataacttgtcttaaaagtaggttcccctctggttcagccacaaccactgctggtgacctcacttcaaacctggctgtgctgcactggggctgctgacacacacctgactatcataagtcgctgtcctttgtcatattcttcctgctggtgcaatatttttcttcctgcctatggcctaatttttagggcaggaagatgaaaataagaccttccatctgttcccacttctaaaatattaggtgtaaagaaatattctctctgaattaaaaactttccacgttgaaccactaacttgaaagttactctttacttttttctttcccctttcccctcttcttttcttctcctttgattcctttttactgaaatccatccccagcctctcctctctctccacattacccccatccctcttcttcagttccctctattacccatcttctctcctttccatggtccagaccacagcaaggcaaaaaaggcacgtagggcacaaaatctaaggagtcttcccgaggtgcaggcatgaccctgagagtgactgtccgtagacacctttgtcacctcgccctagatccagcccttttccttccctatgtctcttactttacatcattcaaataaggatttgtcttccatctctccctattcctttgctcttttggtcacctggtagaatgtttattccttatacatgtaacaactatattatctagaatactcattcagctactgtattgaaagccaacttatgtagggcatacacaagatagaaatctatttatttttcctccaacattcaggggtaagcagttcaaggctgatatggcagttccacagcctcagggttcttccagcccatggctctaccatccagcactgggcttccatctcagcatcagatggctgctccagcacccaccaccacccctacatcccacccagaggaagggaagagaggaagaggagggtttgctccaatctctctctgggcttgacttctgctctcacatcccgttggccagaattcagttatgtcgccacacctccctgcaaaggaggctgagaaatgtttttaaattttgtgcccagccaaaaattctgttactgaaaaggggagagttggaggataactagaaatattttccatgttttatcgtactgagaaattgcatcttttcttactcgaaatattagggagaggaaaacaatagctatccctctcctattctttttcttaatagtgctgcttgcattttagatgaagtgcatttacatgcacttgtataataagtggaatttatggcagaatagtgacgatgttgatgatgatgatgacgaagacaaagacaaagatgaaggcaacagtcgacacctacatatcactgtctaagtgcggatgctattattctaagcctttttatgaagccctccatattaacccactttacccttacaacaacctgagatatacattattattatctctattttacggatgaggtaattgacacagagaagttgcagtgacagagccagtaagggatgaatctagattcaaacctaagtcgtctggctctagagggaaacactgtaaacaatataaatagatgttattcctggtggtagcactggaatatgttgcacagttttaggagaccccatggcagatggcaccatgctgtgctctggaggtgacactggggtcattaacaccatcttctacatgaacgtgcaatgtggcggtctaggtcatgtccttcctcctcccctaataagtctagactctcttcttaattctgtccagtgctctcctcctgcgcaactaaagttcttcttcatctcatttgggaaactaaagccctttctgaatggttttccagggcacgttgattgatgccatcagttcaggagttcctgaacttgtcttcatgtcagagtcacccttagaaccttataataatgcaaacccccaagcctcaccccaggatactctgaataagaaagtctgggctcggctcagtggctcacacctgtaatcccagcactttgggaggctgaggcgggtggatcacgaggtcaagagatggagaccatcctggccaacatggtgaaaccccatctctactaaaaatacaaaaacttagctgggtgtggtggcaggtgcctgtagtcccaactactcgggaggctgaggcaggaggatgacttgaacctgggaggtggaggttgcagtgagctaagatcatgccactgcactccagcctgggcgacagagcgagactctgtctcaaagaaaaaaagaaagtttggggaaatctgtatttttgatccctgatatttgaagtctgtaaaggaaaatagtagtatattcattattatgttcaattaatattaatatgctgaatctgatattgaatctcctctgcagtgtcccaccctggtgacactcagcctttgtacagtgctcacactagtcccaggtctgcaacagcagctcacattgactgagtatcccaggcaccgggacaaggatggatggatgatctcatcaaatccacccaaaatccctcagggctcagtgcaattacccccaaccacagggaaacagactccaaacgttaagtgtgtgcctcaggtcataagctagtaagtgaagtgctctggtgcatgtgggcctggtgtgctgacttcaaagtgagcatgatcacctgccgtgcagtcctgctcctgggctgcagcacctcctcccagccgtgctttgacctctcctcatttcttatacattattcctttttttttttttttcgacaaagtctcactctgtctaccaggctggggtgcagtggtgcaatctcagctcactacaaccttcacctcccgggctcaagcgattctcctacctcagcctcctgagtagctgggactacaggtgcctgccaccatgcctggctaatttttgtatttttagtagagacagggtttcaccatggtggccaggctggtctcgaactcctggcctcaagtgatctgcctgtcttggcctcccaaagtgttgggattacaggcgtgagccgccgcactggcctccatttttaaaatatgaaaactgcaactcaaagaagtcaagaaagtggtccaagtcaaataacttacaagtggctcaggtagaccttgaaacacatttgtctgagccaaaatcccagtttcctctccataagtcacacggctttcctgcagagccccgcagcctcacgacccaaccatatgtgacctcagcataggcaacacatgcagctgaccttaaataaatgcttctggccggatgcggtggctcacacctgtaatcctagcactatgggaggcagaggcgagcgaattgcctgagctcggcagtttgagacgagcctgggcaaagtggcaaaaccccgactctactaaaaatacaaaaaaaaaaaattggctgggtgtggtggtgcacacctgtagtcccagctacttgggaggctgaggtgggaggattgcttgaacccaggaggtggtggttgttgcaatgagctgagatcacgccactgcactccagcctgggcgacggagcgagactctgtctctaaataaataaattaactaccgcttctcacatgggaagatgaagagaaactcttgcacacagacaacaggagacatgtatgtgaaagttccctgcagtgctggtcacagcagataaaaaccaggcacagcacacatgcccttcagtggaagaatagatgaaagaaatgtgggctattcactcagcagaacgttatgcagcagccaaaacaacagacatgccacaatacagaagaatctaagcaacgtaatcttaaatcaaaaaagcaaccagccaggcacattggctcacacctgtaatcccagcatttagggaggcagaggcaggaggattgcttgagcccaggggttcgagaccatcctggacaacatagcaagaccccatctctacaaaaagaaagaaaaggcccggtgtagtggctcatgcctgtaatcctagcactttgggaggccaaggcaggtggatcacctgaggtcaggagttcaagaccagcatggccaatatggtgaaacctcatctctactaaaaacataaaaattagccaggcatggtggcacatgcctgtagttccagcttctcaggaggctgaggcaggagcatcgcttgaacctgggtggcagaggttgcagtgagctgagattgtaccactgcactccagcctggacagcaaagtgagactccatctcaaaaagaaaaaaaaaaaactaacattttttaaatgcatctttaggaatgcatatagatgcaataaaactacctaaaaatgaaagcaaaggattgatggacagaggaatcaggatgattctcaatttggggagtgaagtgggatgagtatatggttaaatgtaggttattgccaaggccctagcttttgctttgggtttacagagccttattacattggaataaaccaatgaatgaaagtggactgtccacgggtgaatgatgagtgtctcagaattccattatgatgattgacccaattctgagcaccctgaggtccaatttaaagaaaagctaggttaaccgatgaagaaatgatttggcatgatgcattatcagctcttggaaggagggattgaattttcttcctagttttgatcctcagctatgtgccttgaggaaaacaatcacgaacgacagcacaaaagagcccagagagaatacgtgaacttgaacccactgatcactgcgagcagggcaggttgtttaagaggggattccatggccaagtgaagtgtgacttcagcaaacgctctcaaaactatgatgcctcccacacagagagcacacatgtgtgcatgcgcacacaccagccgctgctatggaagaaaaacacctgtaacacccacagtccaggagaaaacctgaagagcaaatgcttctgcaaaggtgacatgtgcatttaaaatcacagtatgatgcaaatgacatatcttctctcctaaaagtatatttctcacatggaaaaagggctatgccacatgagagagaggaaatagagcagaaagagtggctgagagaagtccaggtaaattttgctggctttttataattcgactggccctccctgaagactgggcaatagaatttcctcctccctggggctgttgagcttgtcaattctctgatgacacagtcaccaagttctgagaccctgctggagacaaatgtccacaaggaggaggcagcgagctgcaaagagcctggcactcagtgaaggagcctgcctagacgcagcttctcccacagcctgcagctgctgttctctgtgctacaggagagcactaccgcgctgatgaccattagaaggaccacacgctgaagtcccagctacttgggaggctgaggtgggaggatcacttgagcctaagatgtcgaggctgcagtgagctgtgatcactccactgcacaccagcctgagcaacagagactcaatctcaaaaaaacaaaaacaaaaaccaagaaggaccacaaactcccggagtcctagcccatggggatagtcggatagtctctttctctttctctctgtcttttttctttttccttttttttttttttgagatcgagtctcgctctgtcacccaggctggagtgcaatggcacgatctcagctcactgcaacctccacctcccaggctcaagcaattctcctgcctcagcctcccgagtagctggaattacaggtgcccaccactatgcctcgctaattttttgtatttttagtagagacggggtttcaccatgatggccaggctggtcttgaactcctgacctcaggtgatctgcccacctcagcctcccaaagtgctgggattacaggcatgagtcaccgcgaccggctccatgggggtggtcttaatgccacaggttccaggtaagagtggctattgtatgtcccaggaatgagggtgttggggcagatatggcgatgtcactgagcactttctgtacacttctggagaggcagacccccttggcgtctcctcctcctgatcctgactgagtggcaggataggttggaacttagcgtcaagaaagttcagtgtgccagagagtttttccaactatggagctaaaagcaccaaacaaacctccacagtcccttcctgagccacagttctcggctgatgattctataagcagaaggcagctgcaggatggcggaaagcgtatcaacgtggggccagaccactagggactgaatcttggttctgtctgccgtctgcaggatcctggtgatgaacttaatgtcccagactctcactttcatcatctataaaatgggaagaattatagcctcctccaggggagtattggataagattaagtagataatacatgcaaaagagtcgatgacatcatgcgacacattggtgtcacaataaaggttcacttgttcatcatgcatccttgtatctcccggaaagcacccaatggagaaggcaaacgacatggcagcagaagtctggcatcatgggcagggcctgggcggccttacagaggctctctcttattagaggctgcttctcaatggtcaaaaaggtggctccttgggatgctgggacaggagaagttatcactgggggacttttctagggaaggaaacgtttgtgcctagtggccacttcctgggtgaagccctccccgagtcccaccttcctcctcacctccaggcagagcaagcggtcatcctctcctccagacttctggcacgctcatgttattcacaatgacagctcccatattgagcactcagtatataccaggcactgggcttagcacttaccatgcattctttctttctttcttttttttttcttttttctttttttttttttttttgagacagggtcttgctctgtcgcccaggctggagtgcaatagagcaatctcggctcactgaagcccctgcctcccggctgaggcgattctcatgccttagccacccaagtagctgggatgacaaatgctcaccaccacacccggctcatttttgtatttttaggagagacgaggtttcaccatgttggccaggctggtctcgaaccctggacctcaagtgatccacctgccttggcctcccaaggtgctgggattacaggcttgagccacccaggcccggccgcattctttcatttaatcctcataatgacactttgaaagaggaaagtgaagattagcaacatgaaataatagacaaagctgcacagataacacacagtggagtcaggatgcagacccgggtctgctgggtccaagcttgagctttcagccactgcactacaatgcctccctcatgcaccatcatgacccttatcccatgatatgatctttctgcacctgttagtcacaagcggtagactgtcggctgtttagagtcaggaactgtagctcttttgtctatttatcctgagtgcctagcacagtacctggctaagaatgaatgaaaggaaggaagaataaatgaacagatcttctccaaagccccaaggaaggagacagcaccattgttcctcctaggtcaatacaactcaaaacctccattcccatccaagcatgccagagggggaggggataggtggctgcatatggaggctgccccttccctgcagtgcacccctcacccattccaacagcccagagcttagtcatgggagaaacgttgcagtgaaccgagattgcgccactgcatgggcaaccaagcaagactctgtctcaaaaaaagaaaaaagaaagacgacaatattattgtattatattgtattctttctaagattacaatgtaatatattgtatttaatatattgtatctaagaataaatattatatactgtaagaaaaagaaagttatctaaatacaaagaagccatcctatataatattatttattaatatataatatcttattctcaaatacaatattgttcagccttagaaagaaattaaattctgacacatgctacaacatggatgaaccttgagaacattaagctaagtgaaattagctagtcacgagaagaaaaatgctgtgtgattccactcttatgagatacctatattagccaaatgcatatagacacagagagtagaaaagtggttgccagaggctgggtggaaggggaatgaggagttgttgtttcatgggtatagagcattagtttcacaaaacaaaaagagttctggagatgagttgtaagacaatgtaaatgcacttaacactactgaactgtacacttaaaaatggttaaaatggtatattttttattacgtatattttaccacaattttaaaaaatttaaaagagaacaaatatatatatatatatatatatatatatatatatatatatatatatatatatatatagttgttgttgttgttgttttgagacagagtctctctgtctcccaggctagagtgcagtggcatgacctcggctcactgcaacctccacctcccaggttcaagcaattctcctgccccagcctcccaagtagttgtaattacaggcacatgccaccacactcggttaatttttgtgtttttagtagggacagggtttcaccatgttggccaggctggtctcgaactcctgacctcaagggatccacccgcctcagcctcccaaagtgctgggattaggcatgagccaccacacctgggcaacaaaaatataattcttggaaactgaaaagaattttgctaaaaagtaatgcattgtaagtattttaaagatgacagtagggaaatatcctagttcatagagcagaaaagacaaagagatggaaaatgatcatatctgactacttgggaacttcagaaaatacagtaacaattaaggggagaaaaaaattaaatcaagagaatttcccagagaggaaaggagacacacatcttcaaattgaaagggtagactgagtacccagcacaatagatataaataggcatatggttatataaattcatgcagaatatcagaaacccatagattaagaaaagattttagagggcgggcacagtggctcatgcctgtaatcccaggactttgggaggctgaggtagatggatcacctgaggtcaggagttcaagacagaccatcctggctaacaggatgaaaccccgtctctactaaaaatataaaaattagccgggcgcagtggcatgtgtctgtaatcccaggtacttgggaggctgaggcaggagaatcgcttgaacctgggaggcagaagttgcagtgagccgaggtcacaccactgcactccggcaaagacagagaagaaagaaagagagagagggggagggagagagggagggaggaaggagggaagaaatgaaggaaggaaggaaggagggagggagggagggagggagggaaggaaggaagggaaggaaagagaaagagagaaagaaagaagaaagaaagaaagaaagagagagagagaagaatagaaaagaaaggcttccaaagcaaaaaaatacatactaaatactaaaacaggccatccccaaaggcagaggaattagtctggcaaaagactttctatgagcagcacttcaattagcaatattaactcctaagagtatccaggaagacaatgcaatgatgtcttcaaacccccgagaaagagccttcaacctggaattccaaatccagcccaaattgagtaggagcagaacaaatacattttcagatatgtaaagactcaggaagttcacctcccatgctctctttcttaagcaattatttaagtaaattcttaagtcacttctttgaatacttattcatgaggaataaagcaagaaaagtaaaccaagttcatgagagagtagaccaagaaagcagaataaatgagccacagaaatactgaatccgtgtaagaatagaactaaaggaaaatgtcagagctatagctacgcagcaggcccagagacaaccagttcttggaataaacagatagaacactgtgtcagagaggtttgtgagatgacgtagatgagagcttagaaaatgagccttgagcatctgttgaagtccctgaattcaatgtttaaaaacaaattagagccaggaacagtggctcatgcctgtaatctcagcactttgggaggccaaagcaagaggattgcttgagctcaagagttcaagaccagcctggggaacatggtgaaactccatttctgcaaaaaattagccgggcatggtggctcatgcctgtggtcccagatattcaggaggctgaggtgggaggatcagttgagcctgggaagtcaagggtgcagtgagccatgttcgcgccattgtactccagccttgatgacaaggtgagaccttgtctcaaaaaataaaaatttaaaaagtaaattagaaactcagggggaagaagtaaaacaaagtcattatctaatacaaagaagccaatccatatcagaacacaaagtcactgagattcaagaagagaatggaatgcataccaaagagtggaaaactggaagatatgaggaacataatgaagaagacatgcattttctttctcaacaagcaaaaatagaggcaatcataaacttaagagaaaacaataagtatataaaaagacaaagcacagattaaaactgtgccatgattttgagcaatgggtgtattattaaaaagagtgagcataatgtcataccttaaattagatcctggatcagaattaggaaattgggtaaaaacttaggaaatgcaagtgaaaaatggccttccataatagtgtatcagtattggttcatagctgtgacaaagacaccataataatgtaagctgttcctagcaggagaaactgggtgtgggatacacaggagctctctgtactaactttgcaactcttctacaaacaaaataattctaaaattaaaaaaaaaaaattaaaaagccgggcacagtggctcatgcctgtaatcccagcactttgggaggccaagataggcagatcacccgagttcaggagttcaagaccagcctggccaacatggtgaaactctgtctctactaaaactacaaaaattagccgggtgtggtggtgggtgcctgtaatcccagctactcgggaggctgaggcaggagaatcgtttgaacccgggaggtggaggtggtagtgagctgagattgcgccactgtactccagcctgggcgacaagagtgagacattgtctcaaaaataaataaataaataaacaaaatgaaacaaaacttggttttttaaaaaagtatatctgaaagaggttgggaaatgacaggggaaagaagtgaaaagaaggataggaatgctaatgattcatcttagaccttggcaactccaaaaatacaatctacggttcacaaagcaaggaatggaggttggagtctgctgtgtgaaattgcagagttgactggtggaaaaacagaaaatgggggcataactatattgaaaagactgtgcagaggaaatataagggtactagtcaacagatgtttgtaactgttagaccaaaaaaaaaggcattaaaggaactaaaaacagacagagctaaaaaaaaaaaaaaaaaaaaaaaaaaaaaggagcgggggcagggggaagttaccttggaggagaaggactctgggtagggataagagagacgtctaagcccttccataccatttaaatttttgcatatgcatttgttactttgattaaaattttcaaaatgaaacaaacaaaaaattgtacctatccagttcacatcatgacagatacggaaacagaatccatcatagtgattacaattctcaaacaaagggctgaaagcttctgtattaacatgtaaaggagcactcttggcaggtgcgatggctcacgcctgtaatcccagcactttgggaggccgaggcaggcgaatcacgaggtcaggagtttgagaccagcctggccaacataatgaaaccccgcctctactaaaaatacaaaaaattagctgggattggtggtgggcacctgtaatcccagctactcgggggactgaggcaggagaaatcacttgaatccgggaggcggaggttgcagtgagccaagatcatgccactgcactccagcccaggcgacagtgcgagactgtctcaaaaaacaaacaaagaagaggaattgaacacagaaaagtcaatattcacaccctgatagctaggactagaagaggaaacttagagacacaccttaagactccatatgccagaaacatttcccaggcagaggtagctgaggcaacaggcagctacgggagaggggagttaacagctggcaagaaagctgttcctccctgtttggggaaacatgcatgagacagtccttatccatacaaatgacctccctagcacatggagacgggattagaaaatgtctcttctaaaacttttaaatcagaagccctgcagaatgagccacccatcctgagagatggtctgcaaatgtacttaccaatgacacttgaatggccccaaatctcagagagatatcaatccaaaatgtaattactatgagaataacttgactttttaaattattgtgttaatttagaatgtcacaaaaaaggtccaaagggcatgaagctaaaaaaaaatgattagagcttgaaaattttttggtattttccccaggaaagataatactctaatctaaatggacttttagttttagctttgacaggtgaagagtaagaggtcatcatccccacccttacaataggaaaaagctgaacaagctcaaaatcaatgacttttcttggaccatcagagaactgagtttgcagggaaacctgctcctctgaaatctggagagacaagtgcatccagaaagtcacagctgacatctgcttacctggagcagaagccaccggaaccatgagctggtaggaacacttacacagtaattttgaggaaccgttggaggctaagtgtggactaatttgaaagtgagaagctcctgggggtcagtcttaggtgggcacccacattttcatggactttatctccaggaaccccaccaggttctcatggtgatgactgggaaaaccaaagacaaagagaaaaatcttgaaagaaccctaaggaggaaaaagtaggcttcctgcagaggagctagaataaaaattatagtaaattgccaggcatggtggctcacacctgtaatcccaggactttgagaggccgaggtgggcagatcacctgaggtcgggagtttgagaccagcctgaccaacatggagaaaccccgtctctactaaaaatacaaaattagccgggcatggtggcacatgcctgtaatctcagctactcaggaggctgaggaggagaatcgcttgaacctgggaggcagaggttccagtgagccaagattgtgccttgcactccagcctgggcaacaagaatgaaactctgtctcaaattaaaaaatatatatatagtaaacttctcctcagaaagtatgcaagcattggtaggaaaacaggatgactatagttaacaataattgaatgtatatttcaagataactacagaagtgaatttggaatgttcctaacacaaagaaatcataaatgtttacggtgatggatatcccaactaccctgatttgctcattcacattgtacacttacataaaaatataacatgtaccccatgaatacgtacaactagtatgtattcacaaaaattaaaaattagaaaaaaataatttaaaaaagaaagtatgcaagcaaaaagacagtagtataaaatatttaaagtgttagaggggaaaatcaccaacctaggattctatatccagggaaattatccttcaaaaatgaagaagcaccgggcatggtggtgtgtgcctgtagtgttagccctttgggaagctgaggtaggaggatcctttgaggccagaagctcgagaccagtctaggcaacatagcaagacctcatctctacaaaaaaattaaaagattatctgggcatggtactatgcactggtagttccagctacttgggaagctgaggcagaaggattgcttgagcccagaaatttggggctgcagtgtactataatcctacttgtgaatagccacttcactccagcctggacaacatagcaagatcccatttctttaaaaaatgaggaagaaatagatactatcagacaaacaactgaggaatttgtcaccagctgacttcccttacaagaaacgttaaaaaaattttttttcaagcaggacagtgacacatatcagaaacttggatctatatgaagcaaagaagggtgtcagagaaggtgtaaatgaagttcacataaaaatcttatttttcctattcttaattgatctaaaagataactgtttaaagtaacaatagtaatcagtatttaatgattatagcatgtggataaatgacataaatgatagcaatgtcagaaggctggaagggaggactcaggaatactgtttttaaggcacctgcactacacatgaagaagaaatagtgctgtttgaaggtagatttagtttagttttaagaatatactgtaaactctaaagagaactgcttaaatttttttttcagatggagtttcactcttgttgcccaggctggagtgcaatgaagtgatattggctcacagcaaactctgcctcccaggttcaagtgattctcctgcctcagcctcctgagtagctgggattacaggcacacaccaccacacctggctaattttttttttttttttttttttagtagagacagggtttcactatgttggccaggctggtctcaaactcctgacctcaggtgatctacccacctcggcctcccaaagtgctgggattacaggtgtgagctgctgcacctagcctaaaattttttaagaagaattttttactgatattctgagagaagataaaatttttaaaaatcatataaattgctcagagagtgcagaagcagtagcatctgtagatgaataaaaagccgttacaaacatggtcaatattaatccaaatatagtaacaatcactttaaatatgaatggcttaatacactaattaaaggacagagactgtcagagggttatcataaaagaggaagatccaattttatgctgcctaccagaaatatactttaaatataaagactccaaagtttaaaaataaagggatggaaaaagttagacaacacactgatcaaaagaaaactgaagtagcgatgttaataccagacaaagaagacttagaacagggaaaattgttaggagtaaacgggaaacctacctaatgacaaagggaattagttctccaagaaatgtgcatgcacctgattacagagtgtcaaaatacacgaggcaaaaacgaatagaaatgcaaagagaaaaagacaaacccactgtagagatggagaattcaaaaccctctgtcagtaagtgatagatctagcaggaatacaatacataaaggatatagttgacttgaagaacactatcaatcaattcgatctgattggcatttatagaatactctatccaacaataacaaaacacacattcttctcaacctcacctagaatgctcaccaagataagacctcaaaacacatcttaacaaatttaaaagaataggaagacacaacgtatgtaattctaaattaatagtattgttatataacgggcacattctctaaagaatacctactttcctttacttttattatttgctcatgtgaaaggaaaaatgaatcttgggaccccaaaatcactaagctaaagggaaaagtcaggctaggaactgcttagggcaaacttgcctcccattctattcaaagtcatccctctgctcactgagatagatacatatctgattgcttcctttggaaagactaatcagaaactcaaaagaatgcaaacatttttctcttatctacctttgaccaagaagctccgccgcccccccccccacacccccccccccgccctgccacttggagttgtcctgcttttctggaccaaaccagtgtacatcttacatatattgattgatgtctcatatctccctaaaatacataaaccaagctgccccccgaccactttgagcatgctatcaggacctcctgaggctgtgtcatggtgtgtgtccctaactttggcaaaataaacttcctaaattgactgagagctgtctcagatatttggggttcacactaaacaatacgccttctgatgatctcttctgcctagctaatgcctgctcatgctcagcccaaacttaaagattaaaaactttaatacagtataataaaagcataaacaaagttaatcattgaaaagtaatccacagccaggtgcagtggctcacgcctgtaatcccagcattttgggaggctgaggcaggcagattgtttaagcccaggagttcaagcctgggcaatatggaaaacccgtctctaaaaaagatacaaaaattagccaggcatggtggcacacacatgttgtcccggctagtcagagggttcaggcaggaggattgcttgagcctgggaggtcaagactgcagtgagctttaattgagccactgcactctagctcgggtgacagagtgagaccatgtctcaaaaaaacaagaaagaaaagaaaagaaatctatggaaaataatgcaatatttatgacataaaggattaatgcccataatataaaaattgattttataaatcaataaaagagcacattcattcttgacttaactcattctctatacagtagccaaagtagtatctttaaaacccagatctagccatgccatttccctgcttgaagtccttcaatggcttcacattgcccttagaatgaagttcaaaactcttaacatgatccacatgatctggtccttatctatctctagattggtctcccgttacccttctcccatctttctcaggactctagccacactggtcttttctcagctcttcacaccttaaagcctctgcatgtatcgatcgctttgcctggaatcactccaccaccaccaccctcttcgactaatgcccacttttccttcagatctcagcttaaacatcatttctcatgaaagtcttccatcatcaattctggattggttcagatcctctgctatttgctctataaacctgaacaaacagaatcatgtttctgaagcttcagaactccaaacaagactctgaggagtgacccttccaaggaatgtgaggttccaggcaaagcctctagaatcttcttatctataatagtcagggttggtgaggaagctcaggagaaagttaagatgagcgagtctaagctatccgttctgtactttttttgagtatagacaactttgagaacttaataaaatctatgggattcatttcttcttctggagattgcctctcccccagaaaaagtcacagaagcaaaattttgtgtaatgttatcaatgttgcaaagttcccctaacatccatttatccacctcacattaagaaccccaaccattggatgttatgtatttgtcacaggctgaaaacaaacaaacaaacaaacaaaaacaaaaacaaaaaaaatcagcccagtgagaatctcataaaacaaacacattggttccctagctttgttcatttaatcaatgttcattgagtatctacagtatagtgattccagcaataataacaccttataaatgaaatttactttacaatttaaaagaaaataaagacttttcatgtacattgtctcactcttcccccaaacccaataaagtgggcatagattactctacctattttgcagatgagaaaacataagtaatcccagggaacacgagtgatctggttcacacaactcagccaaaaaggagtgaaacccagcagtaaaacgcactcttttaaccctaagcctggctctttccttccatgttgatattgactccaagggcccgtggctggtactaggacttgtccttagtaatctgataataatcccaggggccacagtctcagcctccagttcccatggtggtcagcctcacgctctcatattccatgtgatgatgcaattttgccaatcaaaggtcgcagcagcaggactcccctgacgtataggagaagtagccagagctcttcatcccctgccaggagagcatagtagctcacatttattgagttcttagtacacgctgggcactgttctaggctttttacatgaattaactcattaaatactcagaacaaaaccatgaggcaggtactattataatattatctccattttgtggacacttaggaaagattaatttgcccgagtttgcacgactaataattttcagaatcgagatttgaatcctggagcctgtgctcctaaccaaaccaccatctgcctctcctgagcccattgtccttaacttcttgcggtcatgtgtgctggagagaatgtgatcaaagccctggaccttctccctaggaaaacgcaggtaaacagaattttgcatatttcagggactttggggacacctaagacccatctactgtcgacctcagacttagaagctctatttatctcatacatcctggagagaattgtccagggacaaaaacagaagcgccgccagcgccgcaggacttcgcctctgcaaacgtgtgaggagagctgcgctgcgctgagctgcgtggtgacggagatgcccgttcgctcgggatcaggaacggtgagctcctgggaccgcaatgccctgagaacgcagccgggtgctgagcctccggagtccggtagctgaatgaaatacgcagggatcaccagccggacccaaatcttgcgtccctgccagcatcctggagtcctaagaggcagggattggagcggacaggatctcagaactctggtcccgggcgcacaacggcggagtcgctgttcctggtgctgaaacgctcagtcctggaagaacgtggccgcctgcccgcctggtaccgcgccgcggccgctgcggggaactgtccagtgctgaaaacggatgcggcccggcccgcagagctcagacccaagcctgccgcacccagcggagctcgaaccgagctcctggaagcgctgacgcagagcgcagggagagccggagcggcgagctccaagcctggcatggacctgcagagacccgattcctaccagggaggagctggccctgacttcaacgaccacgtcctgcataaggtaaacatctcctgtattcctcaacctaacgttggaagaggcgccagcaccaggagttttctccactcccctgactttgctttgggacttaatgagaaactagcttgtatctgtgagtctggggagccctttctgtctgatcctgtttcctgctcaaaacagagatgcgtgagctcttggggaagggctgccgccagaggctcagatggtcagaagcttcattcattcacttacatcatctgtgttcctttttcaccccctccttctccttgcctatttatgcccctgggtgacccctggcaccttgctctcctaacccttgtaggagactgcatttctccctgttacatctgctagcagtggccaaatacctgaatttctggccaatttgtctgaaattagataaatggtctgcagcagagatgaactgctgttttcaaatcagactccctcatggctccagaaagcttccctccagccatgattccctcacagcccctgtaagcatttgcttatttcaaagcactaacatatccattgcttccttcactcaagtttcttatgcaactcagttttcagtaatgcaggtctccccctaagatagttgttgggaaaaatagtagcctctctcaggataacagttttaattcaaaatccatcactctgaaataatcaaagtgttatatttgccataagaagttattatggctcaccttccttttctctgactttgccatgccttcctgctccagcccctatattttctgctttgataatgccagttcacctgctagtcctttgaaaagctgtacgtgatcctataggtggagttttttaatcaaaacatcactttgaagagtctatgaatgcaagctttgaaataacctaacccaacctcctcctctatcacccagcttatatttgaggaaactaaaatccagagaggaaaaatgacttgtccaagaaagcaagctggtaaatggcagagctgatactaaaagccagaaattactactacacgtgtagtattctttcctctatatccttactaaacttctcatcaaagtgtgcagtccatggaccagcagcattggcattaccttggaacttattacaatagaaagccctgaccctagattggctgaatctgaatctgcattttaacaagatctctaggaataaatatgcacaataaagttttaggtgcatggctctgtgccatgctgcctgtttctgacacaaatgaaagaaaatcagctattgaaggaagcaggtctctagatctgacagtccatgtgtcttctccctccaggtctctgaattcctaggatatagagaaggagaaaaaatgtataacaactatcccagtctagaaattttaaagccatcacagtttgaagtaaactagaagaaattctgtgctatttgatgttgtcaatttagcccagtaaaaactgcatgcaaggccaggcatggtggctcacacctgtaatctcagcactttgggaggccgaggcggtggaccgcttgaggtcaagggttcaagaccagcctggccaacatggtaaaatctgtctctactaaaaatacaaaaattcgctgggcatggtggtgtgcgcctgtgatcccagctactcaggaggctgaggcaggagaattgcttgagcctgggaggcagagactgcagtgaaccgaaatcacaccactgcactccactctagcctgggcaacaaagcaagaccttgtctcaaaaaaaaaaagaaaaaaaaagtttatgcaagcagaggaacataattacaaatcaattacaaaattttcctggcaactagatatgtgggtctctccaagtttataccatcctataaaggtataaatactcattttgaaagctttaagattgggagctcagattgttcaaaatattgatcagatgtggtattttccatttcaattacccacacacgagatgtaggatgtagtccatgaagactgttacttcctttgagtttattgatcaccaaattgagagtgggaacccattccaacaagttccaacatatttaaaggcaagtatctatttactactagtaaaggctcaatgtcatcagcttggctgtgtgagcaccctgagagcaggagccagccttaaaccttctgtggtgcccagcagagtgacatatgtatgtaaggaaagttttccttcttatatagtgctgacaacctcctcctaatactactttatgattgtgcatgatgttttattgtgatccacttaaaactctttttgtaaaggggtagggcatcaacttatttgtattatattaaaaattactatgtagtagagtccaaggagttcccattgattgattagtgtctattgtccatgagaagcagggctcccctccaacattaattgctaggataaattctttttttgaagtggggtctcagtctgtcacccaggctggaatgcagtggtgtgatctcagctcactgcaacctctgcctcccaggcaagtgattctcccacctcagcctccccagtaactggaactgcaggcatgtgccaccatgcctggctaattttttggcagttgttgttttgtagagacagagtttcaccatgttggccaggctggtcttgaactcctggcctcaagagatccacccgctcggcctcccaaagtgctggcattatatgtatgagccaccatgcccagcgtggggaaatgattttttaaatagacttgttattgacacataacaaacaccactttgggaagctgaggcgggcagatctcttgaggtcaggagttcaagaccagcctggccaacatggcgaaactttgtctctactaaaaatacaaaaatcagctaggcgtggtaacacactcctataatctcagctactagggaggctgagacaggagaatcacttgaaccgaggaggtggagactgcagtgagccaagatcacaccactgcactccagcttcagcaacagagcaagactccatctcaaaaaaacaaaaagaaatatgacaaacaccaaaaaatcctgaatcttatgtgtctaccttggtgaattatcacaaagtgaacatacctgtgcaatcactatcaagagaaagaaatagaaccttgtcagcttcccaagaggccccctcccacattccacttgccaaacaccctcccccagagattgtcattatagaggaagaagcatcatcttgtgttttgacagcacagcagatgttatgtagggtagtcctagaaacttgccagagaagagatattgtcgtatgatgaaacgaaactccaggcttggaataagccaaaccttgatgtgactttgagcaacatctgtgagtcttaattttcttagctataaaataggaatgataatacctgccttattatttttgagcaaggatgttagcgaatataatgtaacgcgtatatataaaatctctggaatataggaagcattcaataaaagtggttgtattggctgggcgcagtggctcccagcactttgggaggccaaggaggatgaatcatgaggtcaggagatcgagaccatcctggccaacatggtgaaaccccatttctactaaaaatacaaaaattagccgggggtggtggcatgcacctgcagtcccagctactcaggaggctgaggcaggagaatcgctttaacctgggaggcagaggttgcagtgaaccaagatcacaccactgcacttcagcctggtgacagagtgagactccatccgaaaaaaaaaaaaaagtggttgtattagggcatgcatcttgggctccaaagcagcttcaatgggtgtcacattcagtctcacctaaaatgatgagctttgtgagaagagcagcagcttcatacaagagaatctcagaaacacacacactacctatttcacaggcagaagtccatggaaataaactcacacaacccatctatacaaaaagcgtgacttctatgcaaacatcccagttctgacttcctaagttgagtatcttttttctcttggaggtggtgtatgggacttgatgaaattcatttatatgaaaaacatacgccaaatatcatgataggcattgtgtagctcttgcactttagctggtcccaatagttggaggctgacccaggcaagcccaagtaactcttagaagattcccgtagggtgggctggaagctgggaactgactgaaaacattgagctcatccatcatgtgcctggagtttttaaatagagttgttgttgccacaaatctgaaaatttggtgcagctaaataatttaaaacaaaggagcaacctggctgctcttttccttagagaactctcagttctctcttgccaccagcttcaagagccatccagggcaatggtctggggtaggggttcaggaacagcccacggattgggtccctactgtgccagggtctgaccttgagctcccagaaaatgaaaagattttcatttcattttcacagagagggcaagcttttgccccagataccagtgaattaggacaaaagggcttcagttcaagcacttacttcctaattccctatcaccagggctctaaggaacatccacataccagactagcttccagagggacgaacaattcctaggacaaagtcagtctcagaaagactgggggtggggggcagaaaaacgtgagctgctcatccattcatccagggcttggttcttcttgggtgaaaagggattaccaggtctctgtcttccaaagtatgtccatttcctccgactgctctaacacctcttctgggtgaaaggaaaaggcaagcaggtaatatctgccactctcccccatctcctgcacttattcttcacttccttcttctattacccatcttgtaatttctgtgtccctcaaaagtccgcatgcctcatcgattcattcagcaaacatgcattggacatttccaaagcgtaaagaactaggctggtcattgtcgagaatatagacgcaaatgattcccaccttcactaagcctgtggcctagaaggcatgcacacaaatggctatacttttatataattccagaagtgtcctaagaaagatacgggtagctgcaagggagtgacccaggaagaaaaggtcatgtctgactgaatttgaaatgtcctctctcacttatggcttctgattaaagttaacctccaggcttggcacggtggctcacacctgtaatcccagcactttgggaggctgaggcaggtggatcatgaggtcaggaattcgagaccagcttggccaacatggtgaaactcgtctctactaaaaatacaaaaattagtcagccgtggtggtgcacgcctgaaatcccagctactcaggaggcagaggcaggagaatcgcttgaacccaggaagcagaagttgcagtgagctgagatcacaccattgcactccagcctgggtgacagagtgagactctgtccccccacaaaaaaaattaaaattaaaaaataaaaaataaagttaacatccatgagagacagagttccacacatcagctagctccctccccatgggactgtcacctattaatcctagggaaaggtctggatacaacagtgttctccttccctgccagaaaattgtacaagagaaagacaaataaaacagcaaaagaccatactcgccattctgtgttcctctctcattctctatcccacaggtgcttcttttatttttttttcgatgaaacaatgataatgataatggtatgcaaatttgtcctcaaaagaatccaaattagcagaaaaatccatgccctgtaagtgaagagagttttgttttcaaagcgcactagttccaattctcaaagatttctattgtcagctcaggaacaaacaagaaagccaagaaaagctagctgctccctgtataatatttccactggcttgttttcctctcttgcttgctctgaaggcttacagataaacaaatgaagtgtatattacatcactggcaatctggtgccgtctgggactcctttggctgataggtcggtcctgcccagatcccagagcaggcagctggtgtggggagtggtggtgcctgctagttctcttaggataacctcagcaggaaatgatggtgactcagtccagcgcctcaaagtcgttttccaaactctccaggctttcctctcctaagcatcctttcctttaatttgtggtccctggggccttttgtgagaaaatgtctgagactcacttgtgttgctgccctaatgtttcctcttataagctgttctagggagggacgtccttcagtttcagggcaggaaactccgccttactgggtggaagtaaacagccagaggtgagcaccaggctggagaattgttgaagtgggcatttgaagtggctctaaatttatcccaatacccttcttgcttccttcctcctcttctcaggcaagagaaacagtctgtagagactgcgagtgcgaatggagatcacagctccttgttaactcactcaggcaatgtagttcccagctgggagtggccctggacatcctcctatctcttaaccagaggaggttttctggggccaagagagacagctccaagcaaacagatctggaaaatattaacccctaactgatgacaccaggcctcaccctgctcctaaagggagcaaggccttgagtggtgcagtgaaaataacttgagacgtgcagggctcaagaattctcccagcacatggttcctgaccttgatttctaagtcagctccctcccttctcatttgcttatcagcgccttttcatttgcttattagcaccttctcatttgcttattagcagacagtttctacccatcaacatgaggatgctatttaatcatttgtgcttttgcaaatgcacatgcttttaggtatctgaaaccaagctgtgcttaagttcaaattttctcttacttgctagccttctgcccctggccaccacacacacagacacacagacacacacacacacacacacacacatgcctgcacatgcacacatacgcacccttcctctcatgagctgtgggcagggccagtgatcatccgtttttgttctctgtctccccttagcttttgttatgagccttttaaaagcaaagcaggctgggtgcagtggcttagtcctgtaatcccagcactttgggagtccaaggcaggcagatcacctgaggtcaggagttcaagatcagcctggccagcatgaggaaactctgtctctagtaaaaatacaaaaattagctgggcgtggtggcaggcgcctgtaaccccagctacttgggaggctgaggcaggagaatcacttgaacccggaaggctgaggttgcagtgagccgagatcgcaccactgcactccagcctgggcaacaaagcaagactctgtctcaaaaaaaaaaaaaaaggcaaagtaaacatttctcctcctcttcttcctccctcgcctgtttgaattttgcattcataccctctcccagcaactctgtttattaaaaatcggaactgtcatttattagagcagtacccctaggggagagtcaggaactggtaacaccttccccaagctcacagtgagaagcagtgtaagctttggaagggaataaagtctggtacacagtccagatgaggcagacaccccctttcagcccctggagtctccctcctcgcctcccccatgcctttacccagatccttcctccttctctgggtcccacctcaggtttcatttggttatcaggtaagaaatattaaaaatcatctctgcactataatccaaagggacccagtaagactaataattgttcccaatacattatccaaataagcatatggtttatttctgcagcactttacagtttgcgaaacactttaatatatgccaagacattttatacttaacatatgctttttccagaagatgttactattaaactaattaatgtccatattaataggacagggaaacaaaggccagatggctgggcatggtgcttcatgcctgtaatcccagcactttgagaggctgagatgggcagatcatgaggtcagtagtttgagaccagcctggccaacatggtgaaaccctgtctctactaaaaacacaaaaattagctgggtgtggtggcgggcacctgtaatcccagctactcaggaggctgaggcaggagaattgcttgaacccaggaggcggaggttgcagtgagctgagattgcgacactgcactccagcctgggtgacacagcaaggctctgtctcaaaaaaaaaaaaaaaaagaaagaaagaaagaaaaaactgacttgctcaaggtcatagccagcattgtggaagcctgaatcattacagcagacccttagatagcacttgcatgccatgtaatattctaagcacttagcatctcttaactcacttaatcctacaacaaacctattttaatctcattttacagatgagtaaactgaggcatggagacattaagaaatttgcctatagtcaaatccaagcaaggtagacaggcagagggatagagtcaggagaggacaaggggcttcaccaagagggtcacagatggtcactactttagggcattgacagcagtccattgtgtggccttcagctctgtagagctggttttgctcactcactcaagagtggctccatctctccagtcaggctgatgttaatcagactcacaagacatgtattgccctagatgccaagccacattataatcaggagatttttttgttcgctaagcatgaaatccaggggaaaaaatggaacttggaggattcaaatgtttaatgctatcaggctgacatgagttggtagctggctacactataggcacagcctcaatctacgaccccactggccccttctacccttaggtcctctcccctaccccttgccccacctctgcctccctcagctgtatatatttaactgccttgggccggacagtcattctattctctccaggtctgtatttcctgcaatcctttaagaactccttgcctttgagcttgagaattccctggacttgacctggttatggggagggaaagggaagggatgttccgttcatcatcgccagagttgtcatttcatacttcttcctccatctcactcaaggcctgtgtcagagccttagggacttggatttcaggggcaagaaccatggaagagtagaaaggtgattggggacatttccttataccccaccaccacccctgttcacatgctccccttgaaatctgatatttctgcctgagaatcctgagaatcaattcagcaaatatttactgcgcaccacatgccagtccccaggaacaaaacccactcttcattccccaaggagctgcgtccagcaggctgggtggatcagagggatggcacaggcagagatggctcaggccacatctgactgcagctcagtgtgccacgtggaccttggtgcccatgaaggtcaaagacctctagtcccatatagtgggaagctgagcccttggggaccaggtcaaaagcttgcagctctcgaggctgccaacttctggctcctggctgattgacggatctgaggggttataaagcccaaagtcccaggatggggccccacctctgaaggtcagagggctctgagcccctcaacacagggatcccttcaagcccatgtccaagaaaggaagagactcctgttgcacttctgagaagtgcccagtgcaaagacccctgtccaattgtggcagagtccaacacatagaaactaagctggatcccttccatgaccatctccaaagacatgggctgaaaaacactcaaccaaacccaaaacaccaggatcccagcccttgggatgacagtgtggcacacaaagagaggcttgggaaaacagaggggcacgccacgtgagctctgcaggcatgtcctccaggaccctcactctcctttccctgaaaccaggtctcctccagacagcaggcacatgagaaccagcatagcataggccctgaccatcacctgtcctgaccaccacctgtgctgtctaccacctgtcctgttcaccactggttccatccaccacctgccccatccatcacttgttctgtccaccacctgtcttgtctactgccttccctcttcaccctcatcctgttcactacctgccctgtccaccacctgtcctgaccaccttctgccctgctcactgattttcttagagtaggaggcagctcattagcagagaaagagaactgggctttgagtaccaaagaaccaagctttatccctgtctctgctgttagccagctgtacattctaggtcattccattccaacagcactttccaacttgcagaaaacttgcatataaatcatttcggttgaattccccagcactgtgtgtaaagagaacaggcattattcttgactgcaaaaggggaaatcttgtgatcaggactctcgatttccagtgacaaaacccaactcaaattggcttaagccgaaaagagaactcattggttcctgtaccagagaagcctagggagtgcagctgacatcgagctcagctggtcccagggactctcagtgacttcggcctcactctctgtctctctctctctctcatttttctctctggcttggctccattcacaggcaggcttctccccgtggggccccattattgacagcagccccaggatcacatcctcacagctcccaattccaaacaaagtcctagacccaatactcactggagactgaaattgccacatgcccacccctgaaccaatactatagccagagggtagaacatgatggacggcttaagctcgggtcacatgtccaccccgaaggtggagtcaatcccacccaagccctgtagatcaagagtggaagaaaatgggccgggcgtggtggatcatgcttgtaatcccagcactttgggaggtcaaggcgggtggatcacccgaggtcgggagttcaagaacagcctgaccaacatggggaaaccccttctctgctaaaaatacaaaattagccggttgtggtggtgcatgcctgcaatcccagctactcaggaagctgaggcaggagaatcacttgaacccgggaggcggaggttgcggtgagccgagattgcaccattgcactccagcctgggcaataagagcgaaactccgtctcaaaaaaaaagagtggaagacaatggtttccagggaaaatgggatggtgtcatctggaggctagccatgcaaaaacaacagatgtcccatggtaatccagggcaaggctgagtcccagcattttcaaatctttaatgagaagtgcctgaaaagaaatgaagagaacttgtcacagtcccacctgaactggcctcttggtgcctcacacatagtgtcatttaagactaaataactggatttgggttattaatgactggacttgggaaacaaactgctgtcaccctatgaagcgataggcttattggggctgcagagccagacctccctctatgggtgggagtagaattttctctgaaggaaatagatgatccaactgtggaccatccagggaagaggttgattggagcagggaatgaggattcaggaagctgacggagctcagacaggaatgaggggaagctcttccgcctctcttaaggaccatggttagctgctatggagacgcctgaatttttccattgctgtgtagggcgtgtcagcccagggctacatgaacacagatgagaagtgaggcagaaaagcaccaaacaaggccaactttatgagtatgccacctacaaagtcacataacgccctgcacttagaagggccctgcatttggtttaacactttgcattcgccatctttaaagtcttaataatgtttgtacaaggacccctgtatttttattttatatagccattcttgctgccagataaaaacccctgcaaggtctgagcctggctctgtggggtagttttgagctattccctggggcacctctgccttctgatggcctcacaccacgcctggttttggatgtgcctcgagtaaccagggaagagtcatcttatgctttgggccagatggcaaaggagtgggcagcaccacagtggcattcactgtcgaggggtggttgcgtccccaggacagcatctgcgagggtcacgggcagcaggaagtgtggcctggaaggcagatcagacagtccgaaggtgggtgggtgggcaagtcctcaggggtaagtggctgtgacagaggcaggggaagaagtagacagggatcatgtttgtgatctgagcattgtgctgaaaaaacaataagttcatattggtggctattagtgaataatgagagtcattattttatttatttatttatttattgagacgagtctctctctgtcaccctggactgcagtggcatgcactctgcctcctctgcctcctcactgcaacctctgcctcccaggttcaagtgatcctcctacttcagcctcctgagcagctaggattacagatgtgtgccatgaagccctgttaatttttttttttttttttagtaaagatggtattggccaggctggtcatgaactccagacctcaagtgatccacctgcctcagtctcccaaagtgctgggattataggcgtgagccaccacacccagccaagagagccattattattaatatatttaattgcaaaatttgaaaaatgaaaaacaaagaaaaaatttcctgtgatgccagtgtttcaaaatacatatcttaaaaataaaaatggactgcgcacggtggcttacgcctataatcccagcactttcggaggccgaggtagctggatcacttgaggtcaggagtttgagaacagcctgaccaacatgacgaaaccctgtctctactaaaaatacaaaaaagttagtcgcgcatggtggcgggtccctgtaaccccaactactcaggaggctgaggcaggagaatcacttgaacctgggaggcagaggttgcagtgagccaagattgtgccactgcactcgagcctgggtgacagagcaaggttctgccttagaaaaaaagaagatgaaattgccatgtaaaaatacatgcatgtgtttatttatacatatgtgtgagatagatagatagatagatagatagatagatagatagatagatagatccatcataggaattttgttatacacatttttaccttcattctttttaatcactacatagaattccattgtatagataagtgaaaattcatggtttattctgaaattttgaaactcatagaaaggtacaaaaactagaagaacaaaaagaaaatgacacatgtacctaccatctatatttactaaatgctaacattttgccttaaaaaaaaaaaaaaagaaggctcctataggtagctgggatccactttgcaagatagccatgggatagaaggttaattgggttactttgtttttgttttgatatggagtcttgctctgtcacccaggctagagtgcagtggcgcgatctcggctcactgcaacctctgccttctgggttcaagcgattctcccacctcagcctcccaagtagctgggattacaagtgtgcaccatcacacccagctaattttttgtgtgtttttagtagagacagggtttcaccatgttgaccaggctggtctcgatctcatgacctcaagtgatctgcctgccttggcctcccaaagttctgagattacaggcgtgaaccactgctccaagccctagtttggttactttgaaatcacagcctgatgggtctgcggcacttttagttacactccatttcgtagaagagaaaagagatctgagagacattcagtggttgttcaagggcactcagcagggaataaaagagaaaccccaatccaagcttcaactccagaccctaactcttctccttatccctccctagattcccaaggtccttaggaaagggaaggcttggactggaagctcccccaaacccctttatcactgacctccagaaatgctagtgaagcccaggtgacaatctcagcctggcccaggataaacaccaaagcaaaatcaatgccagtgggagatattcattcacaaagtggattcaagaccctgcgtgcagagctgctcagatgaagcaggcccaaatgcagttagtcaccgttaattgggtctcaggagtggaggagcaaacaacagcatcccctggggatttgcctccatcaacccaagtgcagggtaagaagcccaggaaagcaagccaagctttgcaagcaccagcactgcccctgggcagactctccttcactctatctccacgttctctcccatttgccctcatatcttgttatattttttttttcttgagatagagtctcactctgtcacccaggctggagtgcagtagtgccatttcggcttaccgtaacctctgcttccaggttcaagcaattctcctacctcagcatcccaggtagctggggttacaggcacacgccaccatgcctggctaattttttgtatttttagtacagacggggtttcaccatgttggccaggctggtgtcaaactcctgagctcaggcaacccacacgcctcagcctccaaaagtgctgggattacagacgtgagccaccaagcccggcctattattattatttttgagatggagtctcgctctgttgcccaggctggagtacagtggcaccatctcagctcactgcaacctctacctcctgggttcgagtgattctcctgcctcagcctcccgagtagctgggattacaggcgtacaccactacacctagctagtttttgtattttttttagtagatacgaggttttgccatgttagccaggctggtctctaactcctgacctcaaatgatccacccatctagccctcccaaagtgctgggattacaggcatgagccatacaaccagcctcttctagtattttaagctgacttactgtacctacatctccactggttctttcccttgccacctgccagacagctggatgttacagtgcaaggatgcaaggtctctgggtcgcagtccttctttgcttattattaattttgcagaggctgtgtgaagtttgaaataagtgcaccgtctgaatttcacaactctttccactgaactgagggaaggcaccgggcagtatagctgagatcagggcctgtgacctgttgcttctttgtcgtggaaaccctctgcgtcattgatagagggcagcattctgcatgtaaatgccaacaagtgccagtgctctgctctgctcatagcagatttctactacacaagggtgcagaatgtccctcctgtatttctgaccttgggggacagtctttcccctcccttaattctgagcccctcctcagaggtaccttcagaaaaacaaatgagtcagtcaccttttctttttatttattcagtttattttatttatttattttatttttatttatttatttatttatttatttgagatggagtcttgctctatctcccaggctggagtgcaatggcacgatcttggctcactgcaacctccatctcccaggttcaagcaattctcctttctcggcctcccaagtagctgggattacaggggcccgccaccacacccagctaatttttgtatttttaatagagatggggtttcaccatgttggccaagctggtctcaaactcctgacctcaggtgatccacctgcctcggcctcccaaagtgctgggattacaggcgtgagccaccacacccagccaagtcaccctttcttgatgcaagagttgcagaccctcaggacagagccatgtgaggatatggtcacagtggactactttggggaaggggcttgtgctggggcagggggaatctgattgcttcaagggtccctttcacaactactggagagctccacagctctcattagtgacaaccttcatcagcctccaaacaaagagggtcactagaggccctcaggggaagcctcactacaccagcggagatgtgatggagcgggtccatgcctggagaacagtgtgaaccggatccatggctgccaattctcagtccatacctaagtaccagcccctgacaagtaccaactgatgtgtaggaaacgatacacacacatcagtagatgttggcataaagttaccaactgtcctttcttaggaaatactgtctattatcctgagacttggggtgctcaaagctcctttcttttatgaaattatggtgacaatggattgttgaatagaaactttgttaagcaacccctcacttaaccaacttattaggtcaaccaatacccttcagtctcttactggagcacactgactaagcctgaggcacagagtgctcacagctggcaggctcttctctgctctcacagttgtggtacctggttaacaagaatgcatttgggcccatacttgcttatgctggtcatacgtgttaactagaatgatgtacttgaatcaattcacctgtaaacaaaggaattggccgggcgtggtggctcacgtctgtaatcccagcactttgggaggccaaggcagggggattacctgaggtcaggagttcgagaccagcctggccaacatggtgaaaccctgtctctactaaaaaatacaaaaaaattagccaggcatggtggcaggtgcctgtaatcccagctacttgggaggctgaggcaggagaattgcttgaacctgggaggctgaggttgcagtgagctgagatcacgccacggcactccagcctgggtgacagagaaagactgcacctcaaaaaaaaaaaaaagaaaagaaaagaaaaagaaaatacaaaggaatttaaacagaaagactattgaccaataaaataagagtgtaaaaaaaaagagaacggttatctctacaaaaactaaactgctttggaaagacactataaaagcctgtcactttttaaaatgctatcaaattaggaatgaatgagagaactgtaaaatatcggaaagaaatgcataaaaatgaagaaagattttgcaatcaggtggcttcataagtttctagaatttcttgcttcatgttaaagaaactggaactgaaaccccaggatcatgtgtgtgtggtttgtgcttcaggaaaggcaatgggccccacttttcagcagacttgtaagcaaagcaaaggctttaggtctacatcaaaatacttgctaataactacacatttagatattttaagtcaaaataaaacatgtagaggaaaaatagccttggcgcagtggctcaaacccgtaatctcagcactttggaaggctgaggcagatggattacttgaagtcagttcaagaccagcctggccaacatggtgaaaccctgtctctactaaaaatacaaaattaaccaggtgtgggcgagtgtggtagctgacacctgtaatcccagcactttgggaggtcgaggtgggcagatcacctgaggtcagaagttcaagaccagcctgaccaacatggtgaagccccgtttctactaaaaatacaaaaattagccaggcatggtggcacatgcctgtaatcccagctacttgggaggccgaggcaagagaatcgcttgaagtcgggaggcagaggttgtggtgagccaagattgcgccactgcactccagcccgggtgacagagcaagactctgtctggaaaaaaaaagaaaaaagaaagaaagaaaagaaaaaatacagtatatctcttttatgagttccgggtttaacaaactttttcaatgaactgaccaattaccaattcctgtgaaattgaataagaatttacctacttggttcagacatatttgactttggcaaagaaaactgaaaagctaaaaaaaatgtgcctacttggtagaataaaaggctgatcactgtatctgtccttgccaatctaaaaaatttattggtacatgaaatcaaccgattccagcagtctcccctttccaaggctaagcagctttgagctctatttttcaagatgtcaagcaaaggtagcctttcacctcacttgagtgcaaatttatcttactcatggattttggaggttgccaactcagtagtttttttttctccctcaactactctcaaacagtactatcttctgaaagccaatgatatgcacatagttctcaaaaggaggctgtccaaagcttacaggcttatcaagtggaatcttttttgacatgaggcctcactctgtccctgaggctggtgtgcagtggtaccatctcggctcactgcagcctcaacttcctacgttcaagcgatcctaccccctcagcctctggagtagctgggtctacagtcgtgcacaaccacacccagctgattttttatttttggtggagatatcctttttgtaggcctccctatgttgctcaggctggtctcaaactcctgggctcaatcgatcacccaccttggcttcccaaagtgctgagattagaggcatgaaccacgatgcctggcctggaatctttaaatattaataattcaaaaaccaagaagggaagccccagcaactttagatggctataaataattaggcactcaatcaggattgagtgcttagaaatcttggagtttgttttaacacaatgtgctttcctggaaatcatataacaagatagtaaatgctaccctcactcagacctgaggaaccatatttaagatggttcctcttgcaataaacgtgctggccagccacccaaattctgccttagcaaagtcatgatggggtgcggggatacggctgagatgacacccagatacaaatctatagacattatgaaacaatttcctttcctgcctcttgcgtatatctgcctccctcctctcgccccagctacttctctagcactctaaactctagctcaggcttgagcaaaccgggctggattagcagctgactcctacagtcatagcactgcacagagagaacccagacacttcctatcaggaccacaaggcagagatctgctctgtccagctctggaattgactggactggctcatgactgtcaacctatttctgagaacataaaaaggtccctttcagactgccaccaattcagagggctagaattttagataaaaacagtatatccagtaatctgttctctcttgtagacacttcctcgtttttttgagacagggtctcgttctgtcaccgaagctggagtgcagtggcatgatcacagctcactgctgcctagaactccagggctcaactgatcctcctgcctcagcctcccaagtagctgggaccacagacgcctggctaatttttttaatttttttgtagagatagcaatcctcaagcaatcctcctacctcagcctctggagtagctgggactgcaggcgtgcgccaccacacccagctaattaattaattattgtaggtctccctgtgttgcccaggctgctctcgaactcctgggctcaatcaatcacctgccttggcctcccaaagtgctgggattagagttgtaagccaccatgcctagcccagaatcgttaagaattaataattcaaaaaccaagggagggaaaccccagtaaccttagatgggtttatcacgttgcccaggcttgtctcaaacacctggactcaagtgatcctcctggctaagccttccaaagcactgggattacaaacgtgagccaccatgcccggcctgtagacaccttttttcaaagtttgactaaggcaaccaaaagggatcagaatggatcggtcttcccatgctgtttcactgctcttcagcagcccatgtccaccatccagatgaaggtagaagcagcccaattcctccagccaagccaaattgagctaaattctagtcttccctgtgcgtctagcttaatgtcagaagtttcatggcaataatcttcactgggatctatgattttatattaccagaaaagatgaatccgtttctatccaacataagcatatacttatacattctgggtagtgctggctgcttgaaataaactctgaaataaatccactttatgcacaatagttgaaatggcacagttacgctctgatctaaggccttatgttatgccatttttttttttttttttgagacggagtcttgctctgtcacccaggctggagtgcagtggcgcgatctcagctcactgcaagctccgccttctgggttcatgccattctcctacctcggcctcccaagtagctaggactacaggcacccgccaccacacccagttaatttttttgtatttttagtagagacggggtttcaccatgttagccaggatggtctcgatctcctgaccttgtgatccgcccacctcggcctcccaaagtgctgggattacaggcatgagccaccgcacccggccatgttatgacttttattcttataccttgactcattctaatttggctctgctttgaacttttccattttaagatctctctgtgggcgcttcttgctctgtaaatttaaaacagtctgtgtcaaaaacagtctcactctgacctgaccagcttagatgactagctcaagaatagtcaagcttgcttgggctccatgaagtcccccagagcggaaaagcccttgaaattctagggaatgatctttgaggtcatgggagcaggatctctccaccaaggtcaccaatgccagatgcccttggggtgtccatagctgtgagaagtcaggcaaaccccaggacacattgatatggactgctaaacatgcctacagcctcctacctgctgggtcaccggcctgtggtgctcagggatagctcgtcatctcttcccaagccatgatgcctttccctgacactttatccccagcccctccctacaatccccccatccaacaaaaatcaacctagatgaagtgatagacctttgtcctccagccagaggacatcgtagcccctcatctctcctcaattttcaggagaggaaaaaggagtctgtccacgtcatgcttctgggcagtcaatcctgaaattccttaggttgtttggcccaggactgccctgccagaatagtgaacaccgctgcctgtgctctgagagatgccttctactccaaatacactgcttattcattgagtcaaccaataaacatttgagaacccatcatgtgccagacagtaactaggcacgggggatatgggagtgaatgagacaaagtccccacttaaggcaccacacagcctagtggagatggggaaaatgacaaacacagaccccactacataagtcatttcaccaaaggaaataaagcggagcaacaagacagagagaaattggaggtgggctgcaggggccactgccccctaagtggccaaggaaggcctcttctaagaggtaacatttaagctgaaatgtgatgataaaaaggagctaactattcaccagtctgcgggaagagcattctggaaaggaggaatagcaaatgccaaggccctaagaagggagcaagccttatcttgttagaaggacagaagaaaagctggtgtgcatggagcagagcctttgagagggagggtggatggagttgggggtgaaggggcagccagcagcccatggatcccctgagaacttgcaggctgggagagaaaccatcagaaggctataagcagggagtaatcaggtctgtgcttggaaaagatcactctggttgctgggacgagaatggactccatggcagagaatgaaagaggaagaccaggcagggaatggttgcttggactagcaatcattgtgggcttggtaaccacagagatgatgagacgtggtggggttcagggtactttctggaaggaaggctgtcagattgctaaaataaagataataactctgtctgggtgtggtggctcacacctataatcccagcactttgggaggtcgagataggcagatcacttgaggccaggagttcgagaccagcctggccaacaaggtaaaatcccatctctactaaaaacatgaaaattagccaggcatggtggcaggcacctgtagtttcagctacttgggagactgaggcaagagaattgcttgaacccgggaatcagaggttgcagtgagccgagatctcaccactgcactccagcctggggaacagagtgagactctttctcaaaaaaaaaaaagatagtccagcatctgtaaatgagcatgatccctgtgtgagcagcagtgtatgtgtatacacacacacacacatgcagacacatgcacatacacactatcctccttatacaaacagtgcagactccaggctctggagtcaaatgtgttcaaattccaactcatctgcttacttgccattaaacttggttcaagtcactgaacctctccatccctagggttctctgtctgtaaaaaggggacagtaatagaagtgcctcatggttgtcatgaggattaaattagttactacatgggaagcatctaaggaagggcaactgccacataccgtatgagtttcctgttgctgctgtaacaaattagcaccaatttcgtggctcattaaaaacaacacaaatttattctcctgcaattctggaggccaggagctcaagatcagtttcaatgggctcaagtcaaggcgtgggcagggctggtttcttttggaggctccaggcaggggaatccattcctttccctttctggcatctgaaggctgcggcattcatggcccctgctcacgtcacacccacgtccacttccatcatcactttgtctctacctctttgaccttctggcctctttcttatgaggacccttgtggtgatattttgggcccacctgaatcagcaagaataacctctctatctcaaagtccttaacttacatacatctgcactgtccctttctgccacagaaggtaacagtcacaggttctgaggattaggacacagatatctttgggggccattattcagcccataacatgtggtaggcaataaataaaggttcattgtattacgataatggtacttcatgataataatgataacatttttctcattatcatcttcatcattcccatgaaagccccagagcatatccctagccccctcctcaactatgtaggagaggaggggacgtttagaaaaccccaactcctagaagccccctgagacttggccccaagcccaacccagagctaggggcaatgctggctgatcaggcagaggcaccagtccccgggttggtcctgatgaggggagcagggggcagacggtcgatgaggcaggagtgtgctcacagcctggggtccaagaaggagcctggagtgcaggctaaggcctgctgatggtgctgtattccgtgggctcctcagggcccctgccggggaggtggctactgaggtggcccatgttgcagtaggtcggttcctgatcctcagcacccaaggtcagagatgcataggaaatgtcctccttcggcaaggaagcctgcagcaaaggcgggctccaggtcagagaggacggcaggaagtgacggtcacggggcagaggagccctcggaggaggatagtggggatggaccattcagggcttctaatcccactcaagccctccagcttcccccttcactctgccaagcaccctgagcttcaaccacaacagaacagattctcccccaaccctgcaccagtgcagcacatttcctgtggaatcccaagtcactcagcctgtctgggactctgctgcccacgtggggactgtgtttgccagtccctgtgtccccaggactgagacttgcctgtgggagctcctaggcgagtcctgcagtgactatggctttgccccacacctgcctcctctatgcccacatgagcaggagaaagcccaccctccaacggggtgcaacggcaggcctgtgtccccctgccccagcctcacagcagcccccatggaggacgcaccatggtgacatattccacttccacctggtcaacctgggcagaggaaagcttcgtggtagccttttgcggggaggttccggccagctgcagggtcaggtctgcatagcagaggtcgccctccaggggctgcagtacctgggacagggaacacaggctggggagtcacaagatctgtctgtggacacaggttccttttccacggtgggacgggacgagagcctctccacttccccaggtgcccctctcccatttccctccgtgtcctccacttctcaggctcctgtacccctcagcccttgtccccctggctgtttccaggccctcagcccccaggccctgcagggtgccatgaggacaggatactttggcacaggacttctctgatattttggaccttctgagagatggaaaatgaggaaggggaaagaagctgcctggtctctctggtccgaccttgggggctatcttacctgctctggggacatcccggctgctaaaagacaaacaacaattcagaattagaaagcccattccccagactcacaagaacccccaggtctagggaagagaaatatggaagaaaagaggtgaattgggtccaggctcagagacagggacctggttctaattctgattcctcagatgacacagtctgtgacattcgtcatgtcacctctctgacctttcacttctccaccaggaaaagagggacaccccagccccctgctccccacatcatagaactgtgcactcagctgatcgggtggccctgccagccatcggctcccctgggagtaagtttgcttctgcagaatcccaactcggcctggaattccaccatgtctctctacctgattcatccttcaggggtcaattcaaagtcatgcctgccttctgcagctacccaggctgtctaatccccctcccgggcccccggggggcacttgctctatgtctgtctcatcatcttcgtcctactgaattctagttagtcctcaggtgggctgtaagctgcagggtggctgggcctgtcccttccttacaacctgggtgcttggctgtgctgagcaggtggtgctccatcagtaaaagttgtctgcagagacaggaatgcaccaagctgtcccccaaccccgagtagaatgtgcaagctgggtcggcacagtagggaccgattttgtttggtttggtttggtttggtttggtttggtttggtttggtttggtttggttttgagatggagtttctctcttgtcacccatgccggagggcaatggcaccatcttggctcactgcaacctccacctcctgggttcaagcgattctcctgccttagcctcctgagtagctggaactacagatgtgtgccaccatatccagctaatttttttgcatttttagtagagaaggggtttcaccatgttggccaggctggtctcgaactcctgacctcaagtgatccacccgcctcaacctccctaagtgcggagattataggcatgagccacgacacccagagattggattggattgtttttccactgggaccgattttcaggtggttgctggtccctgtcttctttctcccctccccagccaccagccccacatccctgccctagggacaacaaagaaatggggggttttcccctggtttcaaaagtctagatgctggagaacacagaaagcacttagaccttaggccgtgggcaatacatttgggagaaaaagcgatgaataaaagtcaggctctaattttgaaaaagcatcacagaaaacaaactaacagagagtcaggctcccctcttcccaggcgaaagatttcccaggctgtggggagggagaagtgttggagggaaccctgtgagagttaggacccagctgttctagaagagaaagaggtacaattgtgtgagaatgtggaagtgaagccacattctcacacaactggggttttgttgaggccaggcctcatgatctgtgagtgtagactcctgcgccaagaggctcctccctgaagagctagttcacaaagggcaagtaggtcagcctgggaaagtccagtgggcaagggagggacagaaggaaaggccattccaatttcctgatcagacttggagggctgtgtgtgtgtgtgcatgcttgtgtaatgtgatgagtgcacatgcactgtgggatccatgcagtgtgtgtgcccatgatcgcgcatgtgtgtgtgcatccactggtgtgtttgtgtctgtttctccctccccattccatgtcagctcagtacctccttgacaaccacatagacccaactctagcgtctagtctagacaccccagactggaccacccacctaagaccattgccacctatgccatcaagagtcaatccaggaaagagacagggaggtggatcagagagaagagaaggggaaggacggaggtgcagggcaggcggcgaatgccaaaacctcctggggctcccctgcaagctccagggcgccccccggtcccctggcactgccagctgctgagggcctttgggactgtgccatttcctgattgtgtgggtaatcccttggaccagatagctcccagatgccacatccccagccacccggcccagtctcagcccagcctcacccaggtcctctcacctttctgctggtacttcatcatcctccaagccaagagtgaggcggccaccaaaagcagcagcaatatggtgaagatgaggggcaggaggacactgagcttcaggagcttgtgcctagaaacaatggcaagcgtcccctgcatcccaggctcaccacctgcctctcagcccaatcccacccacccagcagcaggggagggccacacacctgatgagctgcaggtctgtagtttgcagcctgggaaccctcactcctggggatcctcaaagatgggtttacaatgagtacacatagacacaaagaagggaatggaacaagagacaccagggcctacttgaggatggagggtgggaggaagcaaagaatcaaaaaactacaaactacctattgggtactatacctattacctgggtgacaaaataatctgtacacaaaaccccggtgacgtgcaatttaccgatataacaaatctgtacgtgtacccctgaagctaaaataaaagtttttaaaatttaagaattttaacaaaagatagttgtttttggttttctttgtttttcatttttttgacacagagtcttgctctgtcacccaggctggagtacagtggcatgatctcggctcactgcaacctccacctcccaggttcaagagattcttctgcctcagcctcccaagtagcggggattacaggcacccaccaccacacctagctaatttttgtatttttagtagagacaggattttgccatgtaagccaggctggtctcgaactcctaacctcatgatccgcccacctcagcctcccaaagtgctgggattacaggcgtgagccacagcgcccggccttaacaaaagatagtttttaaaaggagaaaagggttccatgaggtggttttaatgtgtctagaagcctaacagaaattgtagggcagcagactcctaaaacacctcctgcctctacacctgccctctctactgggttgaatagcgtcctcttcccctcgaattcacatccactcagacccgtgaatgtgacctatttgtggatgtaatcaagttaagatgaggtcatagttgattagcatgggccctgatccagcgactggtgtccttacaagagggaaatttggacacataaacacacacaggaagaagaccatgagacgacagagacagggatcagagtgatgccgccacaagaccgggaacacaaaggatcgcaggcgcccaccagcagctggaacagaggcatgagacagactctccctttgagcccccagggtggcaacagccctggtgacaccttgatttccaattcctggcctccttagctgtgagagaacgtatttcttttgctttgagccactcgtaacggcggccacaggacactgacaggccctactgtagtggatcattgccacagcagccggggggcctgtgaaccaaacgtcaaagcacacccctctctttctcaaaattctgcaacaggccaggcacagtggctcatacctgtaatcccagcaacttgggaggctgaagtaggcaggtcacttgaggtcaggagttcaagaccagcctgaccaacatggtgaaactccgtctctaccaaaaaatacaaaaattagctgggtggggtggcgtgtgtctgtaatcccagctacttgggaagctgaggtgggagaattgcttgaacccaggaggcggaggttgcagtgagctgagatcgcgccactgcactccagcctggtcgacagagcaagaccctgtctcaataaataaataaataaataaataaataaacaaacaaacaaacaatcaaaataaaataaataaataaataaatcccgtaacagccccatttcagcccatgaaaatggccagggctgacaatggcctccactcctgcctacgactcacccctgcctgcttcactccagcctcacttcctgctgctcctcaaatattccaggcacatccccacattacggaccttattccagttgcatttttctccaggaacatgctccctccagagctctgtgtggctcactttctcacctcttccagtctttgctcaagaatcactcgactgagcgcggtggcttacacctgtaatcccagcactttgggaggccgaggcaggctgatcacatgaggtcgggagttcgagaccagcctggccaacatggcaaaaccccatctctactaaaaatacaaaataacagccgggtgtggtggtgcattcctgtaatcctggctactcccagctgcttgggaggctgaggcaggagaatcgcttgaacctgggaggcgtaggttgcagtgagccgagatcctgccactgcactccagcatgggtgacagagcaacactccgtctcaaaacaaacaaacaacaaaaaaaactgttgtgggctgggctggattgtacaccaccacccccccaccccaatccatatgttgaagtcccaccctttagtatctcagaatgtgattgtatttgaagataggatctttaaagaggtgattgaggttaagtgaggtcactggggcaggccctaatccattatgactggtgtcattagaagagatcaggacacagacacacgcagagggacgaccacgtgaacacataggaaaaagatagccatctacaagctgagaagactcagaagaaaccaaccttgtggaccacttgatctcagacttttagcctccagaattgtgagaaaataaatttttgtgatttaagcccccattctgaggtattttgttaggggcaacccaagcaaactaatataaggattatctccttcatcactggatgtgcagaaatttgagaaagaaattcatcagtcaattaattgtgtcaaccctatttggttacactaattagctctagattgtaagtacctcgagggcaggcattttgattatttggtccattcttgtaccctttttaattcccttaaacagtgacaggctagagtgagtgctcaagagttatgtgttaaataaatgagtgaacaaaccatctcatgctaatcaaaggccctaatcgggcacttacataaggcttcgattcataaaataataaataaataaataaccttaactattacttattcaaagcagtttggtagaaaataaactttcaaatcagagggtatcctgtattgatttgcttaggaaaaagaaaaatagggacaaagcaaggtggcttatgcttttaatctcagcactttgggaggctgaggtgggcaaatcacttgaggacaggagttggagaccagcttggccaacataacaaaaccccatcgctactaaaaattggccgggcatggtggcttacgcctgtagttgcagctactcgagaagctgaggtatgagaatcacatgaacctgggaggtggaagttgcagtgagctgagattatactactgcactccaacctgggcaacagagtgagaatccgtcaaaaaaaaaaaaaaaaaaacaattagctgggtgtggtggtgggcgactatagttcccccagctactcaggagactgaggcatgagaattgcttgaacatgagaggcagaggttgcagtgagccaagatggcaccatgcactcaagtctgagctacagagcaagactgtctaaaaataaaaaaaaagaaaactttaaaaagtttaatttaaaaaaaaaacagaaggcaaatgggagagggggagtagaagggtctcaggtggttagaataccggggacctcccatagggattttgtggcaaggtcccagcaaaaggagaacttggcacttggcagatctaaaaacaaagtcaagagggccaaggagagtgaaaggaagaaattaaaggggacgttcctcttctagaaagcccagctgactgcagatggttgggcagggcactaagaggcatgacctgagctatggtgtagagcccagagacttccatccaagctccagcaccacccttcactgaggaagggactgaggctcagtttcttcttctgtaaaatgggaacatttgtatctgcccattcttccacatggggtggttgtaggaaaggtcaaagaaaacaaaataatgcacaggaaagccttttgtgagctgtcagttgctctagagatgtgagaaactataggcatcactgttcttgccataatagtaatcagaggaaaattaagggaaacaggacttccccaagccctcctttccttgtcctcccagaagttgaaccaagagtcatccctgcggctccatgaccccacgcccacactcacatgagacacactgtcctcactgactgccaactcatcggtctcccacactgagctccacggggacagtccatgtctgtgtccccagagctcagcacggtgcagccatgtagaagttattataacacagtaaaagtggggcgaacgaatgaatgaacctacaaacagcactgagctgcagaatgaaggatctgtggagactgaaaggacaccatgtggcctgacagcaagtgggaagggctcccagcttcctcatcctcaccaaggagcatgcaggtcccagacaaagctcaggctggaaaatgggacttcaaagagttctccattggaggagtttgggccaagtaggccacagtggaaccagagctggcttacctgttgtccaagtggtggccggtcagagttggggagctgctagtttcttcttgggtgactggtgctgtaaacgtagtggaggtaggcgtggtgggggcaggagtcgacgctgtagttgatgcttggtgtataaaccagatcacagatgcccctgcccatgagcccacccgcagccctgcacacagctctgagcctgggcgggggtctggactgctactatgggaaggggctgcagcctggaccactcatgtctccctggtctctaggagactccagagcctcataggcaggtggggctgggcagggtccagggaggacgctgagctggccctgggagggttagagggggctgggaagagcctaagggcagctggagaccagctgaacttgagcaacctgctgcttatgacagtgccttggtcaatctccacccccagccctatttatccagcaaaaacaggagcagagtgggaacttgcacagtgaccctagatctgtgacatcaaaggtcaggaccagccctgaatgaaatcatcatattcaggaagaactttgactttgggcaagttacaaaacttcaatgatggggatgcccccttctcaggggtattgtgaggacccattgagacaatgcacgttcagcactttgcaaactagaatatgccccagaggctccgggtgcaacctggggccccaaggactgtggtgctccttccatgccacaagggccctcgagccatcctgcttatcttctgagggacagcagaacaagcccaacaaataaacccatgcaaaccgaggcactgggacccctgagctaacgctcccaggagtgtctgcattctagaaggacataggaagaaatatcattaagtccacacacacaaatggctcatggtgggatgtcagggaccaggaatgcagccgtttgactgtgaagacctttctggacttgggaattagaccccagcaccccgactatgctgagcctctttttcccccaggttagatatggaatgggagatgggaacagcagctatgaagccccagcccagaactccaccaaaagcaggacacacctgggcaccagaggtctccaaaaagcaatggcaaggactggggtctctgggtaccatgggaaggcatccctttggcccatgggctgaaactgggaccatcaccttgtcctcaggcactgagctgtgcagaggtaaaaaatgtgcctagaaaggcttaatcccgtcgtggagggagccctgggagccatgggggcattgaagagaggccctgctcccccagtcccaggtggtcagtcagggttctatgagactcgggactcaagtgatagatcactcagtgacaattaaatcacttgagtaggacctcagagaccaggacagagcaggccctgagagacacacacatatatacactccctcttacctgggtcaatggtcacttgaactgtgaccccaaggtcatttccagttttctcaattccacaccagtaagtgtcagcatcagttttcatgagatcctccatggtcacagtgaacgtgcggtttttctgattgtccttgatggacacccggtccctcttcacctcctgctctgacccactggttttaacaaggatcttgcagtcacgccaaatagctcctcgacaccaccacttcaagtaggtctcccagcctgatctgtaaacacactgcacggtcaaggagccccgctccaagccattcactgttgttggaccggtgatttgagtgacaatggagtagcctggaaaacacaaattcatgtgctgtcacctcccaccccaagggcagggccacagctttctgtttagggaatagctcccaaatccaagtttcacaggttaaataacagtcaaggaagaaatacaccttccgcagacaaaacttttgtccttcagctttccactgggtcaaagccaccaggaaaatcactgaagagcacaacaacggatccccccaaaaataaaaatattggcataagcaataataacttcctgcagttcacccctctctccaccctacggccaaggtaatctgtatatttcaaggaatgtccttttgcagccatctttgtgttagtccagtgtggtggggaggaaataccaggagacccctttccacagggtcttaccttgactcttagcactgatgaccctcatgaggtcgagctgaggcagccacatcagatggctgtggagaggctgtcctggtggtcctaatgatttctagtggttctggaataaaccaccctggatgaatgcctttgaagttgatcaaaacagcaacggcaactggtctccatgtgctataggatccatacaacacagatcccactttctttaatgaattgctttgacccctttgtcaaattgcaaatttgtggatttcccattctgttccattgatctatttgtccacctttctgccaatcctacattctcctgattactatcaccttgtagaaaagcaggtattatagacagtaaggcagtatttacttttttttttctttttctctttttttcttttgaaacaggctctcactctgtcgcccaggctggaacacagtggcacaatcatggctcaatcatggctcactgaagccttcacctcccaggcttaattgatcctcccacttcagcctcccaagtagctgggactacaggcacatgcctccacgcctggctaatttttgtagttttagtagaaacaggattttgccatgttgtccaagctggtctcaaactcccgggctcaagcgatccacccacctcagcctcacaaagtgttgggattacaggcgggccccacaacgcctggcctgtattttcttaaaatacatgttttccttcaaaatcatgtcctttgcagcaacatggatgtggctggaggccattatcctaagtgaattaacgcagaaacagaaaaccaaataccgcatgttctcacttataagtgggagctaaacattggttatgcatggacataaagatgggaacaacaggcagaggagggaaaggggcaagaacaaaacagaggagggaagggagcaagcactgaaaaaactaccaattgggtaccatgttcactatctgggtgacaggtttgattgaggctcaaacctcagcatcatgcaatatatccatgtaacaaacctgcacaggtacccactgactctaaaaataaaaaacattttaaaggaaaaaaaaaatatatatatatatatatcccaaagtgctgcgattataggtgtgagcaactgtgcctggccttttttttttttttaagtaaagaaatatttccctgtatccggaatctttcaaaggtgagaatatgagagaaagaataaaaagaacatatatatataaattcccaacatgaggttgggagttcgagatcagcctgaccaacatggagaaacgccatctctactaaacatagaaaaattagcctggcatgatggcacatgcctgtaatcccagctactcgggaggctgaggcaagagaatcgcttgaacccgggaggcagaggttgcaatgagccaagatggcgccatagcactccagcctgggcaacaagagcaaaactccatctcaaaaacaaaacaaaacaaaacaaaaaccagcagttcaagcacaacaaccaacggcgcggacagagggcctcagtgtcagagagaccctgggaaggggtgaggaccacggcagcctggattggagagcagggtatccatgcgaaggcacagccctccttccactccagcccgggtcctggggaaagaagcgggccctgtgacaagaacacacaatggggaaaggacagtctcttcaataaacagtgctgggaaaactcgacatccacgtccagaagaatgaagccggacctttatctcacaacatatacaaaaatcaactcacaatagagaagatgtaaatgtaagacctgaaacttaaatctctcagaagaaaacctaatggaaaagctccacaacattggtcttggcgatgatgtcttggagaggacgccaaaagcacaggcaacaaaagcaaaactagacaaatgggactcacaaaaccaaagagcttctgcacagcaaaggaaacaaccaagagaatgaagcgacaacctacagagtgagagaaaatatttgcaaaccataaatctgacaaagagctgatatccaaaatacataaggaactcaaacaaatcagtaacaagaaaacaaataatctaattaaaaactgggcaaggaatctgaccagatatttctcaaaagaggagctataaatgggcaacagatctatttttaaatgctcaacatctctgatcaccagaaaaatgcaaattaaaaccaaaagagggtcaggcacagtattcacacttgtaattccagcactttgggaggccacattgggtggatcatctgaagtcaggagtttgagaccagcctaggcaacatggtgaaatcttgtctctactaaaaatacaaaaattaaccaggtgtggtggagtgcacctgtaatcccagctacttgggaggctgaggtgggagaatcgtctgaacctgggaggcggaggttgcagtgagccaagatcgtgccactgcattccagcccgagcaacagagtgagactccatctcagaaaaaaaaaaaaaaattaaaagtggtatatgactgtatatcctgcacatattaaaaagttaataaaccatgaataagataaaaggatataataataaaaggatatttaaacaatgttatgccaatgaatttacaatttgagatggaataaacaaattcctagaaaaaaattatacaggccaggcactgtgagaggccgaggcaggtggatcacctgaagtcaggagttcaagaccagcctggccaacatggtgaaaccccatctctactaaaaatacaaaaattagcctggcgtggtggcacacacctgtagccccagccacttgggagactgagacaggagaatcgcttgaacccaggaggtggaagtttcagtgagccgagatcacatcactgcactccaggctgaacaacagaacaagactccatctcaaaaaaaaaaaaaagaaaaaagaaaaagaaagaaaagaaaaaaaatacaatatgctaaaatcagcacaaaataaatagaaaacctgaatcattccacagctattatatttaaataaatcaaatcccttgtttaaaacttccgccagaataaaactccagacccatacagcttcaatggaaatatttaccaaacacgtaaagaagaaataatgtctattttatagataattttccagagcatagaaaaagaagatgaaatcccaaatccatttcacgagattaacataatcttgatgccaaaacctgacaagggcaaagcaagaaagtattgtaggcaaatatcactcattaacataaatgcaaaaacctgaaacaaaagatcagcatacggaatctggtgatacataaacaggataaaacattatcaccaagttgggtttatgccaaacacccaaaatggtttttaacattaaaaaatcaataaggaggctggacgcggtggcttacaccggtaatcccagcattttgggaggccaaggcgggcggatcaggaggtgaggagatcgagaccatcctggctaacacggtgaaaccctgtctctactaaaaatacaaaaaattagccaggcgtggtggcgggcgcctgtagtcccagctactcggaggctgaggcaggagaatgacgtgaacccgggggggcggagcttgcagtgagccgagatcgcgccactgcactccagcctgggcgacagagcaagactccgtctcaaaaaaaaaaaggaaaatcaataaggaggccaggcacggtggtttacacctgcaatcccagcactttgggagtccgagtcaggcagatcacgaggccaagagatcgagacaatcctggccaacatggtgaaaccccgtctctactaaaaattcaaaaaattagctgggcgtggtggcgggcgcctgtagtcccagctgctcgggaggctgaggcaggagaatcgcttaaacccaggaggcggaggttgcagtgagccaagatcacaccactgcactccagcctggagacagagcaagactgactcaaaaaaaaaaaggaaaaaagaaaatcaataagggtaatatgccatattaacagagtcaaggagaaaaatcttgtgatcatcttaggtgcagagagaagtagtgataggaatcaacgctcattcatgattttttaaaaactcttagcaaactaagagaactgcctttatctgataaagattgtctatcaaaaacctcagcaagcaccacacttagtgcgagacattcatatgtactttataataatttgttaacatggatgttgaagttttatgcacttttttgtacattttattttccacaattaaaaagacttttaggacaccataaaccaagagccaaattattcttttttttttgagatggagtcttgcttggtcgcctgtcacccaggccggagtgcactggtacgaacatgggtcactgcagcctcaagtcctgggctcaagtgatccttttgctgtaacctcttatgtagctgggacgacaggaccacaggcatgcaccaccataccaggctagtatttttttttttggagagacaaggtctcactttgttgcccaagctggtctcaaactcctggactcaaccgatctgcctgccttagcctcacaaagtgctgggattacaggcttgagccatcatgcatcaccagccaaattattcttaacagtgaaatactataggcattcctattgacatcataaacaaaacatgaattcccaatatatataataacatgattctggaagttcttttttgtttgtttgtttttttgagatggagtcaggctctgtcgcccaggctggagtgcagtggctcaatctcggctcactgcaagttccgcctcccgggttcacgccattctcctgcctcagcctcctgagtagctgggactacaggcgcccaccaccacgcccagctaattttttgtacttttggtagagatggggtttcaccgtagccaggatggtctcgatctcctgaccttgtgatccgcctgccttggcctcccaaagtgctgggattacaggcgtgagccactgtgcccagcctggaaattctaatcaatataggaagataaggaaaaacataaaatgtataattatcaaaagggaaaaaagttagagaaaattttttaattttaaatgaaaaagtattttaattcataattgaatttaatagagtggctaaataataaacatgtaaaaatcaatggctttcctataaactgctaataaatagttggaaagtaaagtagaaaagtgctcatttacattagcaataaaagtgtattaaattcctaggaataactttaacagaaacaataaagacttatggaaaaaaagcacagtgaggctgggcgcggtggctcacgcctgtaatcccaacactttgggaggccaaggcgggtggatcacttgaggtcaggagttcgagaccagcctaaccaacatggtaaaaccccatctctactaaaaatacgaaaaaaaaaaaaaaatagccaggcatgctggcacacctgtaatcccagctacttgggaggctgaggcagaagaatcacttgaatctgggaggcagaggttgcagtgagccaagatcgcgccactgcactccagcctgagtgacagagcgagactctgtctcaaaaaaaaaaacaaaaaatctgttcttgccaggcacggtggctcatgcttttaatcccagcaactcagacggccaaggcaggaggatcacttgagcccaggagttgaggctgcagtgagctatgatcatgccaccacactccagcctaggcaacagactgagaccccaactcaaaaaaaataaaaaaccttcctttctcacagaaaacaaacttccggatgggtattttttttcttgggtgttttaaaacgataaattatttagaagagggaaacagggtaagcacacttgctgcttgtgggtggaagttctgcaggagaggctggcaagagctgatgcatgcaggttcacagtggtatccgggctccatgttggcgcccatagctgtgcctgctggcttttctgcccacttcagacagaggtcccaaaccactcccactcccaacacgactctcacatctgctcactaccaaattctctcatttccaggtgtcagaaaaaaagcagccatacctgtcctggtctcactgtgccaatgcatttcataacatctcacccaaagtctgccttctccacttacatgctgaaactcggggccaagtgtccatgagccactccctgctcttcctgtaccagcctagcagtcctggacaagtcactttcttccccaagaccttttctccaatctgtcccaccaggatcttctgaagcatgaggcaaagccgtgctgacctccctcttcctcagacgtgcccagtccaagctcattcctacacaagagccctcgtatctactgttccctgtgcctggaaagctggtcccgatcctgtgtctgatccttttcctaggtctcggctcggacaggcatctgggaccctcttcaggggggttgtttcagcccacctgacttacagcatccccctacctgggtcccactgtaacatatcatcttgttctgttttcctcacagtacttatcacttctcacttcttgaaattatttttttgttttctttctttttttttcttttttcttttttcttttttttttttttttgaaacagagtctcgctctgtcacccatgctggaaggcagtagtgtgattacaggtcactgcagcctccaactcctgggctcaagtgatcctcatgcctcagcctccagcctcccaagtagctgggaccataggcacatgccaccatacctggctaatttttgtactttttgtagagacagggtttccacatgttacccaagctggtctcgaatccctgagctcaagcaatcagcctcccaaagtgctgggattacaggaatgagcctctttccctggcctcccttcatttttaataaaaattgtatgcaccaacttaaggtgtctcctgccctctggctctgcccacatctcagtccctcctttcctctacgtccctgccagtcttatctcctcttgacctttccgtccctcagcaacttctactatttccttctgccccaaatgcctagaaccaccactccctctctgcccagcaaactccctcttccctcctttcaaagtcctccagcctcacctcttccctgacgcctgcccttgctcagaacacctccacgcaggtgacagatcacccagtccaggatcaggcagtcgcctgctctcctgagcagcccatgttcctcctctgcttttccctggccggcggggcctacagtctgtccatttcacatgatcagcccctgggggtcaggaattctgccttgcactggcttcattatgaaggtcatgccctgtattcctgccttggcaacggaaatgctaggtgaatggtgggtatgtggatgaaacgcacaaggctcatgccattaaggacaccttctggccgggtcccttcttccctctctcagccacctcctcctgcttgctaagcttccccaagaagacagacccaggcccgctcacctgagagccagaagaggagcaggtagagtgtcagcaggggcatcttctcttcagacaggtccccgttcccctcagtggagcctggcagcaggaacaaactacagactcccagccttctgctggtactcactctcgcccttgaacttcctccttcagtcacttcccatgggtgaaagagactaaaagaggaaggaggtggttggttgggcaccgtggctcaggcctgtaatcctggcactttgggaggccaaggcgggcggatcacgagatcaggagttcaagatcagcctggccaacatagtgaaaccccgtctctactagaaatacaaaaattagccaggcgtggtggcgcacacctgtagtcccagctactcaggaggctgagacagaagaatcgcttgaacctagtaggcggaggttgtagtgagccgagatcgtgccacttgcactccagcctgggtgacagaacaagactctgtctcaaacaaaaacaaaaaaaaaaaaaaaaagaggaaggaggtggaaagggtgaaatttcgaggcagttgacaatgcaaggggtcacaggaatcatcagcttctgagaagtacctctctgtacacagccaccgtgggttctctaaaaagagaacttcgtggctcctctgtcatgtggaaacctgcagacagatccactgggtctggccagcccttatccaatcctccaaacctggtgggttggctgggggcaggggcacgcggctccaccagaggggtcctggagagccacggctgatagacacgatgtcctaaacctggagcttcaggtgtagccagatgcttgggagcccagaaggccagaagttcaagaggattgaggggcacttgtggccaaagtcagaaagccagaggagagattccagaccaaaggttggaaggcagctatgaggagattgggtatccaaccccagactacaaggccaggtacggtggctcacacctgtaatctcagcactttaggaggctgaggcaggaagatcacttgaggccaggagttcaagaccagcctgggcaacatggcaaggcttcatctccacaaaaaaaaaaaaaaaaaaaaaaaaaaaaagtcaggcatggtggctcatgcctgtaatcccaacactttgggaggccaaggtaggcagatcactccaggtcaggagttagagaccggcctggccaaaatggtgaaaccccatctctactaaaaaatacaaaaattagctgggcgtggtagcattcacctgtaatcccagtgactcgggaggccgaggtaggagaatcacttgaacccaggcggcagaggttgcagtgaacccagatcgcaccactgaactccaacctaggcaacagagcaagactctgtctcaaaaataataacaataataataataattagttctgcagagtcatgcatgcctgtagtccaagcaatctgggaagctaaggcctgaggattacctgagcccaagaggtcgaaactgcagtgagctatgattgagccactgttcactgtactccagcctgggcaacagagcagacgctgtctctttaaacacacacacacacacacacacacacacacacacacacgcacgcacagagaggttcagagagaagggagatgcaagcagggaactactggcccactgacaagaggcgctttgtcctgagaacacgaaggaagctcctactgctgtaccccagcccaccaggtgagatcccagggatacctacatctggaatcttccagaaacctgtccattgtaccagggggtctacctgaggaaaccagttcattgctcaggactattatcccctcgctccacccctcaccttataactatttgttgaaggaaggaaggaagaaaggaaggaccagttttgcccctcactctcctccttctgacaatcatgtccatcccccatctctcctttcccatcaagaccccagcaagtccctagggtcgggactggggatataaaaggattaggaagggccagactcagtggctcacacttgtaatcccagcattttgggaggccaaggcaggtggatcacctgaggtcaggagttcgagatcagcctggccaacatggcaaaaccccgtctctactaaaaatacaaaacttagccgggtgtggtggtgggtgcttataatcccagctactcaggaggctgaagcaggagaataacttgaacacaggaggtggagattgcagtgagctgagatcgcaccattgcactacagcctgggcaacaagagtgaaactccatctcaaaataaataaataaataaaaataaataaaaggattagacctttctcaccttctgcacctggagccacttttgccatgtgtcacatacaccctgtgacatcttgacaagggagtgagtctcaaagagggacgcaaccccctcacaccctaatcaggaatgagtgggtgtgcagagggttatttgcacagaaaaccacagcagctgataagccatggcttttccaggacgtggccagagatggcttctcgctttacatatctgcagaccataaagtaggtcaagaatccggggtgagggcttggccagccctttggtccctgctgcatgtcaataggtcctctgcccagggcaccatgcagatactcagagagcaatcagccctctgcagtagggaagccattggcttccaggaaaaaggaccaggaatgggggctgccctgaaaaacaaggggcagatgcatcgagggtggtggggtaagctttcttctcctgggcatgagcaacaaggagggaacagcactgtctgttagaactgcctgtggccagaccctctgatcgtggcctctcccagacctggcctccccaagaaggattcccctttgaaacaagaacagagaattcaggccgggcacggtggcttacacctgtgatctcaactctttgggaggctgaggcaggcggatcacctgaggtcaggagttcaggaccagcctggccaacatgtcgaaaccccatctctactaaaaaatacaaaaaattagccgggcatggtggtggatgtctgtaattctagctactaaggaggctgaggcaagagaattgcttgaacccgggaggcagaggttgcagtaagccgaggtcacaacactgcactcctccagcctgggtaactgagcaacacactgtctcaaaaagaaaaagcagagaattcgccaagtggttctgagtagctgctcctctaaccaagtgcctatggggaatacaggggaatcggctcttctgcaggccttgcgtcctcaaaaactcatttgaacctgtaatcctggtttgaccattgacctatacacaagccagttatatccctgggcttccctgtccccatatgtgaaagcagggattagacaggtcatctgagattctccctgctctaacgcacctatgtatgtatgtatgtgtgtgtgtgcatgtatgtacgtgaatggttgaacctgtcattctgccctggccttgtgtgctctgctaggggactctgtctagcacctaagaaccagtctctgtttttataaatcataattcttctcagaaaccattcctgagcccttttagttcccctcacttccaattgcactttatctttcccaaccacttgtgctatgtttcatattttccatcattattacattgaatcctcactataaatctagaggaaaggtgatgcgtttctcatttttcaaagaaattgagacgcagagagcaagtgacgtgtccaaggtcacatagctagtaagtggcagagccaagattcaaacccaggcctggttcatataagccatgctgccttgtgtcagggtcagggagggggcagagaaagagagagagagagagagagagaaaacagcccttagatcctgctcagtgctgacaatgaagaattgataaagcagagaatcccggagctggttgtcaccagggcgtccactccaaggttgttttttaaacaaatttcctggccgggtgcagtggctcacgcctgtaatcccagccctttgggagggcaaggtaggcggatcacctgaggtcaggagttcaagaccagcctgaccaacatggtgaaaccctgtctctactaaaaatacaaaaaattagcttggcatggtgataggtacctgtagtcccagctgctcaggaggctgaggcaggagaatcacttgaacctgggaggcagaggttgcagtgagctgagatcgcaccattgcattccagcctgggcaacgagagcgaaactctgtctcaaaaataaaataaaatgaaataaaacaaatttcagaatgaaagaatgttttatcatgcactgaaaactgacttattaagcaggtaactgataccaccagccttgaacattttccagatctcatgcccctcttctgcagtgtatggaatgggaatctgggccttacccaagttcttgtccaggaattcaggcacaggcaaagcttatttctgagaaaaataggcgtctccaaagagtgagtctgaaagtttgtgtctctcgaatttcatacgttgaaacttaaccttcaatgtgatggcattacgaggttgagcctttggagagtaactaggtcaggagagtaactaggtctcctgaatgggattagtgcccttataagaaaggccccagagggctgggcgcggtggctcatgcctgtaaccccagcacttagggaggccgaggcaggcagatcacctgaggtcgggagggagttcaagaccagcctaaccaacatagagaaaccccgtctctactgaaaatacgaaattagccagatgtggtgcatgcctgtaatcccagctactcaggaggctgaggcagaagaattgcttgaacctgggaggcagaggttgtggtgagccaagatcgtaccattgcactccagcctgggcagcaagagcgaaactccatctaaaaaaaaaaaaaaaaaaacagaaaagaaaaagaaaggtgccagagagctgccttgccccttctaccatgtgaggacacagcaagaaggagtcctccctgaggagtgggtcctcaccagatcctgagcctaccagtgccttgaccttggactctccaggctccaaaactgtgagaaatacatttctgtttataaaccacacaatcagcagggcatagtggcccacacctgtaatcccagcactttgggaggccaaggcaggcagatcccttgagatcaggagctccagaccagcctggccaacatggtgaaactccgtctctaccaaaagatacaattagctgggcatggtggcacgaccctgtagtcccagctacttcggaggctgaggcaggggaatcacctgagcccaggagacggaggttgcagtgagccaag
